(19) United States
(12) Patent Application Publication
(10) Pub. No.: US 2007/0031823 A1
(43) Pub. Date: Feb. 8, 2007

(54) BIOINFORMATICALLY DETECTABLE GROUP OF NOVEL VACCINIA REGULATORY GENES AND USES THEREOF

(75) Inventor: Itzhak Bentwich, Kfar Daniel (IL)

Correspondence Address: ROSETTA-GENOMICS, 10 PLAUT-STREET SCIENCE PARK, P.O. BOX 2061, REHOVOT, 76706, IL

(73) Assignee: ROSETTA GENOMICS, Rehovot (IL)

(21) Appl. No.: 10/604,943

(22) Filed: Aug. 28, 2003

Related U.S. Application Data
(60) Provisional application No. 60/441,241, filed on Jan. 17, 2003.

(51) Int. Cl. C12Q 1/70; G06F 19/00; G01N 33/48; G01N 33/50; C07H 21/04

(52) U.S. Cl. 435/5; 536/23.72; 702/20

(57) ABSTRACT

The present invention relates to a group of novel viral RNA regulatory genes, here identified as “viral genomic address messenger genes” or “VGAM genes”, and as “genomic record” or “GR” genes. VGAM genes selectively inhibit translation of known host target genes, and are believed to represent a novel pervasive viral attack mechanism. GR genes encode an operon-like cluster of VGAM genes. VGAM and viral GR genes may therefore be useful in diagnosing, preventing and treating viral disease. Several nucleic acid molecules are provided respectively encoding several VGAM genes, as are vectors and probes, both comprising the nucleic acid molecules, and methods and systems for detecting VGAM genes, and for counteracting their activity.

### BACKGROUND OF INVENTION

[0001] 1. Field of the Invention

[0002] The present invention relates to a group of bioinformatically detectable novel viral RNA regulatory genes, here identified as “viral genomic address messenger” or “VGAM” genes.

[0003] 2. Description of Prior Art

[0004] Small RNAs are known to perform diverse cellular functions, including post-transcriptional gene expression regulation. The first two such RNA genes, Lin-4 and Let-7, were identified by genetic analysis of Caenorhabditis Elegans (Elegans) developmental timing, and were termed short temporal RNA (stRNA) (Wightman, B., Ha, I., Ruvkun, G., Cell 75, 855 (1993); Erdmann, V. A. et al., Nucleic Acids Res. 29, 189 (2001); Lee, R. C., Feinbaum, R. L., Ambros, V., Cell 75, 843 (1993); Reinhart, B. et al., Nature 403, 901 (2000)).

[0005] Lin-4 and Let-7 each transcribe a ˜22 nucleotide (nt) RNA, which acts a post transcriptional repressor of target mRNAs, by binding to elements in the 3″-untranslated region (UTR) of these target mRNAs, which are complimentary to the 22 nt sequence of Lin-4 and Let-7 respectively. While Lin-4 and Let-7 are expressed at different developmental stage, first larval stage and fourth larval stage respectively, both specify the temporal progression of cell fates, by triggering post-transcriptional control over other genes (Wightman, B., Ha, I., Ruvkun, G., Cell 75, 855 (1993); Slack et al., Mol. Cell 5, 659 (2000)). Let-7 as well as its temporal regulation have been demonstrated to be conserved in all major groups of bilaterally symmetrical animals, from nematodes, through flies to humans (Pasquinelli, A., et al. Nature 408, 86 (2000)).

[0006] The initial transcription product of Lin-4 and Let-7 is a ˜60-80 nt RNA, the nucleotide sequence of the first half of which is partially complimentary to that of its second half, therefore allowing this RNA to fold onto itself, forming a “hairpin structure”. The final gene product is a ˜22 nt RNA, which is “diced” from the above mentioned “hairpin structure”, by an enzyme called Dicer, which also apparently also mediates the complimentary binding of this ˜22 nt segment to a binding site in the 3″ UTR of its target gene.

[0007] Recent studies have uncovered 93 new genes in this class, now referred to as micro RNA or miRNA genes, in genomes of Elegans, Drosophilea, and Human (Lagos-Quintana, M., Rauhut, R., Lendeckel, W., Tuschl, T., Science 294, 853 (2001); Lau, N. C., Lim, L. P., Weinstein, E. G., Bartel, D. P., Science 294, 858 (2001); Lee, R. C., Ambros, V., Science 294, 862 (2001). Like the well studied Lin-4 and Let-7, all newly found MIR genes produce a ˜60-80 nt RNA having a nucleotide sequence capable of forming a “hairpin structure”. Expressions of the precursor ˜60-80 nt RNA and of the resulting diced ˜22 nt RNA of most of these newly discovered MIR genes have been detected.

[0008] Based on the striking homology of the newly discovered MIR genes to their well-studied predecessors Lin-4 and Let-7, the new MIR genes are believed to have a similar basic function as that of Lin-4 and Let-7: modulation of target genes by complimentary binding to the UTR of these target genes, with special emphasis on modulation of developmental control processes. This is despite the fact that the above mentioned recent studies did not find target genes to which the newly discovered MIR genes complementarily bind. While existing evidence suggests that the number of regulatory RNA genes “may turn out to be very large, numbering in the hundreds or even thousands in each genome”, detecting such genes is challenging (Ruvkun G., “Perspective: Glimpses of a tiny RNA world”, Science 294, 779 (2001)).

[0009] The ability to detect novel RNA genes is limited by the methodologies used to detect such genes. All RNA genes identified so far either present a visibly discernable whole body phenotype, as do Lin-4 and Let-7 (Wightman et. al., Cell 75, 855 (1993); Reinhart et al., Nature 403, 901 (2000)), or produce significant enough quantities of RNA so as to be detected by the standard biochemical genomic techniques, as do the 93 recently detected miRNA genes. Since a limited number clones were sequenced by the researchers discovering these genes, 300 by Bartel and 100 by Tuschl (Bartel et. al., Science 294, 858 (2001); Tuschl et. al., Science 294, 853 (2001)), the RNA genes found can not be much rarer than 1% of all RNA genes. The recently detected miRNA genes therefore represent the more prevalent among the miRNA gene family.

[0010] Current methodology has therefore been unable to detect RNA genes which either do not present a visually discernable whole body phenotype, or are rare (e.g. rarer than 0.1% of all RNA genes), and therefore do not produce significant enough quantities of RNA so as to be detected by standard biochemical technique. To date, miRNA have not been detected in viruses.

### SUMMARY OF INVENTION

[0011] The present invention relates to a novel group of bioinformatically detectable, viral regulatory RNA genes, which repress expression of host target host genes, by means of complementary hybridization to binding sites in untranslated regions of these host target host genes. It is believed that this novel group of viral genes represent a pervasive viral mechanism of attacking hosts, and that therefore knowledge of this novel group of viral genes may be useful in preventing and treating viral diseases.

[0012] In various preferred embodiments, the present invention seeks to provide improved method and system for detection and prevention of viral disease, which is mediated by this group of novel viral genes.

[0013] Accordingly, the invention provides several substantially pure nucleic acids (e.g., genomic nucleic acid, cDNA or synthetic nucleic acid) each encoding a novel viral gene of the VGAM group of gene, vectors comprising the nucleic acids, probes comprising the nucleic acids, a method and system for selectively modulating translation of known “target” genes utilizing the vectors, and a method and system for detecting expression of known “target” genes utilizing the probe.

[0014] By “substantially pure nucleic acid” is meant nucleic acid that is free of the genes which, in the naturally-occurring genome of the organism from which the nucleic acid of the invention is derived, flank the genes discovered and isolated by the present invention. The term therefore includes, for example, a recombinant nucleic acid which is incorporated into a vector, into an autonomously replicating plasmid or virus, or into the genomic nucleic acid of a prokaryote or eukaryote at a site other than its natural site; or which exists as a separate molecule (e.g., a cDNA or a genomic or cDNA fragment produced by PCR or restriction endonuclease digestion) independent of other sequences. It also includes a recombinant nucleic acid which is part of a hybrid gene encoding additional polypeptide sequence.

[0015] “Inhibiting translation” is defined as the ability to prevent synthesis of a specific protein encoded by a respective gene, by means of inhibiting the translation of the mRNA of this gene. “Translation inhibiter site” is defined as the minimal nucleic acid sequence sufficient to inhibit translation.

[0016] There is thus provided in accordance with a preferred embodiment of the present invention a bioinformatically detectable novel viral gene encoding substantially pure nucleic acid wherein: RNA encoded by the bioinformatically detectable novel viral gene is about 18 to about 24 nucleotides in length, and originates from an RNA precursor, which RNA precursor is about 50 to about 120 nucleotides in length, a nucleotide sequence of a first half of the RNA precursor is a partial inversed-reversed sequence of a nucleotide sequence of a second half thereof, a nucleotide sequence of the RNA encoded by the novel viral gene is a partial inversed-reversed sequence of a nucleotide sequence of a binding site associated with at least one host target gene, and a function of the novel viral gene is bioinformatically deducible.

[0017] There is further provided in accordance with another preferred embodiment of the present invention a method for anti-viral treatment comprising neutralizing said RNA.

[0018] Further in accordance with a preferred embodiment of the present invention the neutralizing comprises: synthesizing a complementary nucleic acid molecule, a nucleic sequence of which complementary nucleic acid molecule is a partial inversed-reversed sequence of said RNA, and transfecting host cells with the complementary nucleic acid molecule, thereby complementarily binding said RNA.

[0019] Further in accordance with a preferred embodiment of the present invention the neutralizing comprises immunologically neutralizing.

[0020] There is still further provided in accordance with another preferred embodiment of the present invention a bioinformatically detectable novel viral gene encoding substantially pure nucleic acid wherein: RNA encoded by the bioinformatically detectable novel viral gene includes a plurality of RNA sections, each of the RNA sections being about 50 to about 120 nucleotides in length, and including an RNA segment, which RNA segment is about 18 to about 24 nucleotides in length, a nucleotide sequence of a first half of each of the RNA sections encoded by the novel viral gene is a partial inversed-reversed sequence of nucleotide sequence of a second half thereof, a nucleotide sequence of each of the RNA segments encoded by the novel viral gene is a partial inversed-reversed sequence of the nucleotide sequence of a binding site associated with at least one target host gene, and a function of the novel viral gene is bioinformatically deducible from the following data elements: the nucleotide sequence of the RNA encoded by the novel viral gene, a nucleotide sequence of the at least one target host gene, and function of the at least one target host gene.

[0021] Further in accordance with a preferred embodiment of the present invention the function of the novel viral gene is bioinformatically deducible from the following data elements: the nucleotide sequence of the RNA encoded by the bioinformatically detectable novel viral gene, a nucleotide sequence of the at least one target host gene, and a function of the at least one target host gene.

[0022] Still further in accordance with a preferred embodiment of the present invention the RNA encoded by the novel viral gene complementarily binds the binding site associated with the at least one target host gene, thereby modulating expression of the at least one target host gene.

[0023] Additionally in accordance with a preferred embodiment of the present invention the binding site associated with at least one target host gene is located in an untranslated region of RNA encoded by the at least one target host gene.

[0024] Moreover in accordance with a preferred embodiment of the present invention the function of the novel viral gene is selective inhibition of translation of the at least one target host gene, which selective inhibition includes complementary hybridization of the RNA encoded by the novel viral gene to the binding site.

[0025] Further in accordance with a preferred embodiment of the present invention the invention includes a vector including the DNA.

[0026] Still further in accordance with a preferred embodiment of the present invention the invention includes a method of selectively inhibiting translation of at least one gene, including introducing the vector.

[0027] Moreover in accordance with a preferred embodiment of the present invention the introducing includes utilizing RNAi pathway.

[0028] Additionally in accordance with a preferred embodiment of the present invention the invention includes a gene expression inhibition system including: the vector, and a vector inserter, functional to insert the vector into a cell, thereby selectively inhibiting translation of at least one gene.

[0029] Further in accordance with a preferred embodiment of the present invention the invention includes a probe including the DNA.

[0030] Still further in accordance with a preferred embodiment of the present invention the invention includes a method of selectively detecting expression of at least one gene, including using the probe.

[0031] Additionally in accordance with a preferred embodiment of the present invention the invention includes a gene expression detection system including: the probe, and a gene expression detector functional to selectively detect expression of at least one gene.

[0032] Further in accordance with a preferred embodiment of the present invention the invention includes an anti-viral substance capable of neutralizing the RNA.

[0033] Still further in accordance with a preferred embodiment of the present invention the neutralizing includes complementarily binding the RNA.

[0034] Additionally in accordance with a preferred embodiment of the present invention the neutralizing includes immunologically neutralizing.

[0035] Moreover in accordance with a preferred embodiment of the present invention the invention includes a method for anti-viral treatment including neutralizing the RNA.

[0036] Further in accordance with a preferred embodiment of the present invention the neutralizing includes: synthesizing a complementary nucleic acid molecule, a nucleic sequence of which complementary nucleic acid molecule is a partial inversed-reversed sequence of the RNA, and transfecting host cells with the complementary nucleic acid molecule, thereby complementarily binding the RNA.

[0037] Still further in accordance with a preferred embodiment of the present invention the neutralizing includes immunologically neutralizing.

### BRIEF DESCRIPTION OF DRAWINGS

[0038] FIG. 1 is a simplified diagram illustrating a mode by which viral genes of a novel group of viral genes of the present invention, modulate expression of known host target genes;

[0039] FIG. 2 is a simplified block diagram illustrating a bioinformatic gene detection system capable of detecting genes of the novel group of genes of the present invention, which system is constructed and operative in accordance with a preferred embodiment of the present invention;

[0040] FIG. 3 is a simplified flowchart illustrating operation of a mechanism for training of a computer system to recognize the novel genes of the present invention, which mechanism is constructed and operative in accordance with a preferred embodiment of the present invention;

[0041] FIG. 4A is a simplified block diagram of a non-coding genomic sequence detector constructed and operative in accordance with a preferred embodiment of the present invention;

[0042] FIG. 4B is a simplified flowchart illustrating operation of a non-coding genomic sequence detector constructed and operative in accordance with a preferred embodiment of the present invention;

[0043] FIG. 5A is a simplified block diagram of a hairpin detector constructed and operative in accordance with a preferred embodiment of the present invention;

[0044] FIG. 5B is a simplified flowchart illustrating operation of a hairpin detector constructed and operative in accordance with a preferred embodiment of the present invention;

[0045] FIG. 6A is a simplified block diagram of a dicer-cut location detector constructed and operative in accordance with a preferred embodiment of the present invention;

[0046] FIG. 6B is a simplified flowchart illustrating training of a dicer-cut location detector constructed and operative in accordance with a preferred embodiment of the present invention;

[0047] FIG. 7A is a simplified block diagram of a target-gene binding-site detector constructed and operative in accordance with a preferred embodiment of the present invention;

[0048] FIG. 7B is a simplified flowchart illustrating operation of a target-gene binding-site detector constructed and operative in accordance with a preferred embodiment of the present invention;

[0049] FIG. 8 is a simplified flowchart illustrating operation of a function & utility analyzer constructed and operative in accordance with a preferred embodiment of the present invention;

[0050] FIG. 9 is a simplified diagram describing a novel bioinformatically detected group of regulatory genes, referred to here as Genomic Record (GR) genes, each of which encodes an “operon-like” cluster of novel miRNA-like genes, which in turn modulates expression of a plurality of target genes;

[0051] FIG. 10 is a block diagram illustrating different utilities of genes of a novel group of genes, and operons of a novel group of operons, both of the present invention;

[0052] FIGS. 11A and 11B are simplified diagrams, which when taken together illustrate a mode of gene therapy applicable to genes of the novel group of genes of the present invention;

[0053] FIG. 12A is an annotated sequence of EST72223 comprising novel gene GAM24 detected by the gene detection system of the present invention;

[0054] FIGS. 12B and 12C are pictures of laboratory results, which when taken together demonstrate laboratory confirmation of expression of the bioinformatically detected novel gene GAM24 of FIG. 12A;

[0055] FIG. 12D provides pictures of laboratory results, which when taken together demonstrate further laboratory confirmation of expression of the bioinformatically detected novel gene GAM24 of FIG. 12A;

[0056] FIG. 13A is an annotated sequence of an EST7929020 comprising novel genes GAM23 and GAM25 detected by the gene detection system of the present invention;

[0057] FIG. 13B is a picture of laboratory results, which confirm expression of bioinformatically detected novel genes GAM23 and GAM25 of FIG. 13A;

[0058] FIG. 13C is a picture of laboratory results, which confirm endogenous expression of bioinformatically detected novel gene GAM25 of FIG. 15A;

[0059] FIG. 14A is an annotated sequence of an EST1388749 comprising novel gene GAM26 detected by the gene detection system of the present invention;

[0060] FIG. 14B is a picture of laboratory results, which confirm expression of the bioinformatically detected novel gene GAM26 of FIG. 14A;

[0061] FIGS. 15A through 363D are schematic diagrams illustrating sequences, functions and utilities of 349 specific viral genes of the novel group of viral regulatory genes of the present invention, detected using the bioinformatic gene detection system described hereinabove with reference to FIGS. 1 through 8; and

[0062] FIGS. 364 through 440 are schematic diagrams illustrating sequences, functions and utilities of 78 specific viral genes of a group of novel regulatory “operon-like” viral genes of the present invention, detected using the bioinformatic gene detection system described hereinabove with reference to FIGS. 9 through 14.

### BRIEF DESCRIPTION OF SEQUENCES

[0063] A Sequence Listing of genomic sequences of the present invention designated SEQ ID:1 through SEQ ID:3750 is attached to this application, enclosed in computer readable form on CD-ROM. The genomic listing comprises the following nucleotide sequences: Genomic sequences designated SEQ ID:1 through SEQ ID:363 are nucleotide sequences of 363 gene precursors of respective novel genes of the present invention; Genomic sequences designated SEQ ID:364 through SEQ ID:726 are nucleotide sequences of 363 genes of the present invention; and Genomic sequences designated SEQ ID:727 through SEQ ID:3570 are nucleotide sequences of 3025 gene precursors of respective novel genes of the present invention.

### DETAILED DESCRIPTION

[0064] Reference is now made to FIG. 1 which is a simplified diagram illustrating a mode by which genes of a novel group of genes of the present invention, modulate expression of known host target.

[0065] The novel genes of the present invention are micro RNA (miRNA)-like, regulatory RNA genes, modulating expression of known host target. This mode of modulation is common to other known miRNA genes, as described hereinabove with reference to the background of the invention section.

[0066] VGAM GENE and TARGET GENE are two human genes contained in the DNA of the human genome.

[0067] VGAM GENE encodes a VGAM PRECURSOR RNA. However, similar to other miRNA genes, and unlike most ordinary genes, its RNA, VGAM PRECURSOR RNA, does not encode a protein.

[0068] VGAM PRECURSOR RNA folds onto itself, forming VGAM FOLDED PRECURSOR RNA. As FIG. 8 illustrates, VGAM FOLDED PRECURSOR RNA forms a “hairpin structure”, folding onto itself. As is well known in the art, this “hairpin structure”, is typical genes of the miRNA genes, and is due to the fact that nucleotide sequence of the first half of the RNA of a gene in this group is an accurate or partial inversed-reversed sequence of the nucleotide sequence of its second half. By “inversed-reversed” is meant a sequence which is reversed and wherein each nucleotide is replaced by a complimentary nucleotide, as is well known in the art (e.g. ATGGC is the inversed-reversed sequence of GCCAT).

[0069] An enzyme complex, designated DICER COMPLEX, “dices” the VGAM FOLDED PRECURSOR RNA into a single stranded RNA segment, about 22 nucleotides long, designated VGAM RNA. As is known in the art, “dicing” of the hairpin structured RNA precursor into shorter RNA segments about 22 nucleotides long by a Dicer type enzyme is catalyzed by an enzyme complex comprising an enzyme called Dicer together with other necessary proteins.

[0070] TARGET GENE encodes a corresponding messenger RNA, designated TARGET RNA. This TARGET RNA comprises 3 regions: a 5″ untranslated region, a protein coding region and a 3″ untranslated region, designated 5″UTR, PROTEIN CODING and 3″UTR respectively.

[0071] VGAM RNA binds complementarily a BINDING SITE, located on the 3″UTR segment of TARGET RNA. This complementarily binding is due to the fact that the nucleotide sequence of VGAM RNA is an accurate or partial inversed-reversed sequence of the nucleotide sequence of BINDING SITE.

[0072] The complimentary binding of VGAM RNA to BINDING SITE inhibits translation of TARGET RNA into TARGET PROTEIN. TARGET PROTEIN is therefore outlined by a broken line.

[0073] It is appreciated by one skilled in the art that the mode of transcriptional inhibition illustrated by FIG. 1 with specific reference to VGAM genes of the present invention, is in fact common to all other miRNA genes. A specific complimentary binding site has been demonstrated only for Lin-4 and Let-7. All the other 93 newly discovered miRNA genes are also believed by those skilled in the art to modulate expression of other genes by complimentary binding, although specific complimentary binding sites for these genes have not yet been found (Ruvkun G., “Perspective: Glimpses of a tiny RNA world”, Science 294, 779 (2001)). The present invention discloses a novel group of genes, the VGAM genes, belonging to the miRNA genes group, and for which a specific an complimentary binding has been determined.

[0074] Reference is now made to FIG. 2 which is a simplified block diagram illustrating a bioinformatic gene detection system capable of detecting genes of the novel group of genes of the present invention, which system is constructed and operative in accordance with a preferred embodiment of the present invention.

[0075] A centerpiece of the present invention is a bioinformatic gene detection engine 100, which is a preferred implementation of a mechanism capable of bioinformatically detecting genes of the novel group of genes of the present invention.

[0076] The function of the bioinformatic gene detection engine 100 is as follows: it receives three types of input, expressed RNA data 102, sequenced DNA data 104, and protein function data 106, performs a complex process of analysis of this data as elaborated below, and based on this analysis produces output of a bioinformatically detected group of novel genes designated 108.

[0077] Expressed RNA data 102 comprises published expressed sequence tags (EST) data, published mRNA data, as well as other sources of published RNA data. Sequenced DNA data 104 comprises alphanumeric data describing sequenced genomic data, which preferably includes annotation data such as location of known protein coding regions relative to the sequenced data. Protein function data 106 comprises scientific publications reporting studies which elucidated physiological function known proteins, and their connection, involvement and possible utility in treatment and diagnosis of various diseases. Expressed RNA data 102, sequenced DNA data 104 may preferably be obtained from data published by the National Center for Bioinformatics (NCBI) at the National Institute of Health (NIH), as well as from various other published data sources. Protein function data 106 may preferably be obtained from any one of numerous relevant published data sources, such as the Online Mendelian Inherited Disease In Man (OMIM) database developed by john Hopkins University, and also published by NCBI.

[0078] Prior to actual detection of bioinformatically detected novel genes 108 by the bioinformatic gene detection engine 100, a process of bioinformatic gene detection engine training & validation designated 110 takes place. This process uses the known miRNA genes as a training set (some 200 such genes have been found to date using biological laboratory means), to train the bioinformatic gene detection engine 100 to bioinformatically recognize miRNA-like genes, and their respective potential target binding sites. Bioinformatic gene detection engine training & validation 110 is further describe hereinbelow with reference to FIG. 3.

[0079] The bioinformatic gene detection engine 100 comprises several modules which are preferably activated sequentially, and are described as follows:

[0080] A non-coding genomic sequence detector 112 operative to bioinformatically detect non-protein coding genomic sequences. The non-coding genomic sequence detector 112 is further described hereinbelow with reference to FIGS. 4A and 4B.

[0081] A hairpin detector 114 operative to bioinformatically detect genomic “hairpin-shaped” sequences, similar to VGAM FOLDED PRECURSOR of FIG. 1. The hairpin detector 114 is further described hereinbelow with reference to FIGS. 5A and 5B.

[0082] A dicer-cut location detector 116 operative to bioinformatically detect the location on a hairpin shaped sequence which is enzymatically cut by DICER COMPLEX of FIG. 1. The dicer-cut location detector 116 is further described hereinbelow with reference to FIG. 6A.

[0083] A target-gene binding-site detector 118 operative to bioinformatically detect host target having binding sites, the nucleotide sequence of which is partially complementary to that of a given genomic sequence, such as a sequence cut by DICER COMPLEX of FIG. 1. The target-gene binding-site detector 118 is further described hereinbelow with reference to FIGS. 7A and 7B.

[0084] A function & utility analyzer 120 operative to analyze function and utility of host target, in order to identify host target which have a significant clinical function and utility. The function & utility analyzer 120 is further described hereinbelow with reference to FIG. 8.

[0085] Hardware implementation of the bioinformatic gene detection engine 100 is important, since significant computing power is preferably required in order to perform the computation of bioinformatic gene detection engine 100 in reasonable time and cost. As an example, it is estimated that using one powerful 8-processor PC Server, over 30 months of computing time (at 24 hours per day) would be required in order to detect all miRNA genes in human EST data, and their respective binding sites.

[0086] For example, in order to address this challenge at reasonable time and cost, a preferred embodiment of the present invention may comprise a cluster of a large number of personal computers (PCs), such as 100 PCs (Pentium IV, 1.7 GHz, with 40 GB storage each), connected by Ethernet to several strong servers, such as 4 servers (2-CPU, Xeon 2.2 GHz, with 200 GB storage each), combined with an 8-processor server (8-CPU, Xeon 550 Mhz w/8 GB RAM) connected via 2 HBA fiber-channels to an EMC Clariion 100-disks, 3.6 Terabyte storage device. Additionally, preferably an efficient database computer program, such as Microsoft™ SQL-Server database computer program is used and is optimized to the specific requirements of bioinformatic gene detection engine 100. Furthermore, the PCs are preferably optimized to operate close to 100% CPU usage continuously, as is known in the art. Using suitable hardware and software may preferably reduce the required calculation time in the abovementioned example from 30 months to 20 days.

[0087] It is appreciated that the abovementioned hardware configuration is not meant to be limiting, and is given as an illustration only. The present invention may be implemented in a wide variety of hardware and software configurations.

[0088] The present invention discloses 349 novel viral genes of the VGAM group of genes, which have been detected bioinformatically, as described hereinbelow with reference to FIGS. 15 through 363. Laboratory confirmation of 4 genes of the GAM group of genes is described hereinbelow with reference to FIGS. 12 through 14.

[0089] Reference is now made to FIG. 3 which is a simplified flowchart illustrating operation of a mechanism for training of a computer system to recognize the novel genes of the present invention. This mechanism is a preferred implementation of the bioinformatic gene detection engine training & validation 110 described hereinabove with reference to FIG. 2.

[0090] Bioinformatic gene detection engine training & validation 110 of FIG. 2 begins by training the bioinformatic gene detection engine to recognize known miRNA genes, as designated by numeral 122. This training step comprises hairpin detector training & validation 124, further described hereinbelow with reference to FIG. 12 A, dicer-cut location detector training & validation 126, further described hereinbelow with reference to FIGS. 6A and 6B, and target-gene binding-site detector training & validation 128, further described hereinbelow with reference to FIG. 7A.

[0091] Next, the bioinformatic gene detection engine 100 is used to bioinformatically detect sample novel genes, as designated by numeral 130. An example of a sample novel gene thus detected is described hereinbelow with reference to FIG. 12.

[0092] Finally, wet lab experiments are preferably conducted in order to validate expression and preferably function the sample novel genes detected by the bioinformatic gene detection engine 100 in the previous step. An example of wet-lab validation of the abovementioned sample novel gene bioinformatically detected by the system is described hereinbelow with reference to FIGS. 13A and 13B.

[0093] Reference is now made to FIG. 4A which is a simplified block diagram of a preferred implementation of the noncoding genomic sequence detector 112 described hereinabove with reference to FIG. 2. Non-protein coding genomic sequence detector 112 of FIG. 2 preferably receives as input at least two types of published genomic data: expressed RNA data 102, including EST data and mRNA data, and sequenced DNA data 104. After its initial training, indicated by numeral 134, and based on the abovementioned input data, the non-protein coding genomic sequence detector 112 produces as output a plurality of non-protein coding genomic sequences 136. Preferred operation of the non-protein coding genomic sequence detector 112 is described hereinbelow with reference to FIG. 4B.

[0094] Reference is now made to FIG. 4B which is a simplified flowchart illustrating a preferred operation of the noncoding genomic sequence detector 112 of FIG. 2. Detection of non-protein coding genomic sequences to be further analyzed by the system generally preferably progresses in one of the following two paths.

[0095] A first path for detecting non-protein coding genomic sequences begins by receiving a plurality of known RNA sequences, such as EST data. Each RNA sequence is first compared to all known protein-coding sequences, in order to select only those RNA sequences which are non-protein coding. This can preferably be performed by BLAST comparison of the RNA sequence to known protein coding sequences. The abovementioned BLAST comparison to the DNA preferably also provides the localization of the RNA on the DNA.

[0096] Optionally, an attempt may be made to “expand” the non-protein RNA sequences thus found, by searching for transcription start and end signals, upstream and downstream of location of the RNA on the DNA respectively, as is well known in the art.

[0097] A second path for detecting non-protein coding genomic sequences starts by receiving DNA sequences. The DNA sequences are parsed into non protein coding sequences, based on published DNA annotation data: extracting those DNA sequences which are between known protein coding sequences. Next, transcription start and end signals are sought. If such signals are found, and depending on their “strength”, probable expressed non-protein coding genomic sequences are yielded.

[0098] Reference is now made to FIG. 5A which is a simplified block diagram of a preferred implementation of the hairpin detector 114 described hereinabove with reference to FIG. 2.

[0099] The goal of the hairpin detector 114 is to detect “hairpin” shaped genomic sequences, similar to those of known miRNA genes. As mentioned hereinabove with reference to FIG. 1, a “hairpin” genomic sequence refers to a genomic sequence which “folds onto itself” forming a hairpin like shape, due to the fact that nucleotide sequence of the first half of the nucleotide sequence is an accurate or

[0100] The hairpin detector 114 of FIG. 2 receives as input a plurality of non-protein coding genomic sequences 136 of FIG. 4A, and after a phase of hairpin detector training & validation 124 of FIG. 3, is operative to detect and output “hairpin shaped” sequences found in the input expressed non-protein coding sequences, designated by numeral 138.

[0101] The phase of hairpin detector training & validation 124 is an iterative process of applying the hairpin detector 114 to known hairpin shaped miRNA genes, calibrating the hairpin detector 114 such that it identifies the training set of known hairpins, as well as sequences which are similar thereto. Preferred operation of the hairpin detector 114 is described hereinbelow with reference to FIG. 5B.

[0102] Reference is now made to FIG. 5B which is a simplified flowchart illustrating a preferred operation of the hairpin detector 114 of FIG. 2.

[0103] A hairpin structure is a two dimensional folding structure, resulting from the nucleotide sequence pattern: the nucleotide sequence of the first half of the hairpin sequence is an inversed-reversed sequence of the second half thereof. Different methodologies are known in the art for detection of various two dimensional and three dimensional hairpin structures.

[0104] In a preferred embodiment of the present invention, the hairpin detector 114 initially calculates possible 2-dimensional (2D) folding patterns of a given one of the non-protein coding genomic sequences 136, preferably using a 2D folding algorithm based on free-energy calculation, such as the Zucker algorithm, as is well known in the art.

[0105] Next, the hairpin detector 114 analyzes the results of the 2D folding, in order to determine the presence, and location of hairpin structures. A 2D folding algorithm typically provides as output a listing of the base-pairing of the 2D folded shape, i.e. a listing of which all two pairs of nucleotides in the sequence which will bond. The goal of this second step, is to asses this base-pairing listing, in order to determine if it describes a hairpin type bonding pattern.

[0106] The hairpin detector 114 then assess those hairpin structures found by the previous step, comparing them to hairpins of known miRNA genes, using various parameters such as length, free-energy, amount and type of mismatches, etc. Only hairpins that bear statistically significant resemblance of the population of hairpins of known miRNAs, according to the abovementioned parameters are accepted.

[0107] Lastly, the hairpin detector 114 attempts to select those hairpin structures which are as stable as the hairpins of know miRNA genes. This may be achieved in various manners. A preferred embodiment of the present invention utilizes the following methodology comprising three steps:

[0108] First, the hairpin detector 114 attempts to group potential hairpins into “families” of closely related hairpins. As is known in the art, a free-energy calculation algorithm, typically provides multiple “versions” each describing a different possible 2D folding pattern for the given genomic sequence, and the free energy of such possible folding. The hairpin detector 114 therefore preferably assesses all hairpins found on all “versions”, grouping hairpins which appear in different versions, but which share near identical locations into a common “family” of hairpins. For example, all hairpins in different versions, the center of which is within 7 nucleotides of each other may preferably be grouped to a single “family”.

[0109] Next, hairpin “families” are assessed, in order to select only those families which represent hairpins that are as stable as those of known miRNA hairpins. For example, preferably only families which are represented in at least 65% of the free-energy calculation 2D folding versions, are considered stable.

[0110] Finally, an attempt is made to select the most suitable hairpin from each selected family. For example, preferably the hairpin which appears in more versions than other hairpins, and in versions the free-energy of which is lower, may be selected.

[0111] Reference is now made to FIG. 6A which is a simplified block diagram of a preferred implementation of the dicer-cut location detector 116 described hereinabove with reference to FIG. 2.

[0112] The goal of the dicer-cut location detector 116 is to detect the location in which DICER COMPLEX of FIG. 1, comprising the enzyme Dicer, would “dice” the given hairpin sequence, similar to VGAM FOLDED PRECURSOR RNA, yielding VGAM RNA both of FIG. 1.

[0113] The dicer-cut location detector 116 of FIG. 2 therefore receives as input a plurality of hairpins on genomic sequences 138 of FIG. 5A, which were calculated by the previous step, and after a phase of dicer-cut location detector training & validation 126 of FIG. 3, is operative to detect a respective plurality of dicer-cut sequences from hairpins 140, one for each hairpin.

[0114] In a preferred embodiment of the present invention, the dicer-cut location detector 116 preferably uses a combination of neural networks, Bayesian networks, Markovian modeling, and Support Vector Machines (SVMs) trained on the known dicer-cut locations of known miRNA genes, in order to detect dicer-cut locations. Dicer-cut location detector training & validation 126, which is further described hereinbelow with reference to FIG. 6B.

[0115] Reference is now made to FIG. 6 B which is a simplified flowchart illustrating a preferred implementation of dicer-cut location detector training & validation 126 of FIG. 3. Dicer-cut location detector 116 first preprocesses known miRNA hairpins and their respective dicer-cut locations, so as to be able to properly analyze them and train the detection system accordingly:

[0116] The folding pattern is calculated for each known miRNA, preferably based on free-energy calculation, and the size of the hairpin, the size of the loop at the center of the hairpin, and “bulges” (i.e. mismatched base-pairs) in the folded hairpin are noted.

[0117] The dicer-cut location, which is known for known miRNA genes, is noted relative to the above, as well as to the nucleotides in each location along the hairpin. Frequency of identity of nucleotides, and nucleotide-pairing, relative to their location in the hairpin, and relative to the known dicer-cut location in the known miRNA genes is analyzed and modeled.

[0118] Different techniques are well known in the art for analysis of existing pattern from a given “training set” of species belonging to a genus, which techniques are then capable, to a certain degree, to detect similar patterns in other species not belonging to the training-set genus. Such techniques include, but are not limited to neural networks, Bayesian networks, Support Vector Machines (SVM), Genetic Algorithms, Markovian modeling, and others, as is well known in the art.

[0119] Using such techniques, preferably a combination of several of the above techniques, the known hairpins are represented as a several different networks (such as neural, Bayesian, or SVM) input and output layers. Both nucleotide, and “bulge” (i.e. nucleotide pairing or mismatch) are represented for each position in the hairpin, at the input layer, and a corresponding true/false flag at each position, indicating whether it was diced by dicer at the output layer. Multiple networks are preferably used concurrently, and the results therefrom are integrated and further optimized. Markovian modeling may also be used to validate the results and enhance their accuracy. Finally, the bioinformatic detection of dicer-cut location of a sample novel is confirmed by wet-lab experimentation.

[0120] Reference is now made to FIG. 7A which is a simplified block diagram of a preferred implementation of the target-gene binding-site detector 118 described hereinabove with reference to FIG. 2. The goal of the target-gene binding-site detector 118 is to detect a BINDING SITE of FIG. 1, located in an untranslated region of the RNA of a known gene, the nucleotide sequence of which BINDING SITE is at least partially complementary to that of a VGAM RNA of FIG. 1, thereby determining that the abovementioned known gene is a target gene of VGAM of FIG. 1.

[0121] The target-gene binding-site detector 118 of FIG. 2 therefore receives as input a plurality of dicer-cut sequences from hairpins 140 of FIG. 6A which were calculated by the previous step, and a plurality of potential target gene sequences 142 which derive sequence DNA data 104 of FIG. 2, and after a phase of target-gene binding-site detector training & validation 128 of FIG. 3, is operative to detect target-genes having binding site/s 144 the nucleotide sequence of which is at least partially complementary to that of each of the plurality of dicer-cut sequences from hairpins 140. Preferred operation of the target-gene binding-site detector is further described hereinbelow with reference to FIG. 7B.

[0122] Reference is now made to FIG. 7B which is a simplified flowchart illustrating a preferred operation of the target-gene binding-site detector 118 of FIG. 2. In a preferred embodiment of the present invention, the target-gene binding-site detector 118 first performs a BLAST comparison of the nucleotide sequence of each of the plurality of dicer-cut sequences from hairpins 140, to the potential target gene sequences 142, in order to find crude potential matches. Blast results are then filtered to results which are similar to those of known binding sites (e.g. binding sites of miRNA genes Lin-4 and Let-7 to target genes Lin-14, Lin-41, Lin 28 etc.). Next the binding site is expanded, checking if nucleotide sequenced immediately adjacent to the binding site found by BLAST, may improve the match. Suitable binding sites, then are computed for free-energy and spatial structure. The results are analyzed, selecting only those binding sites, which have free-energy and spatial structure similar to that of known binding sites.

[0123] Reference is now made to FIG. 8 which is a simplified flowchart illustrating a preferred operation of the function & utility analyzer 120 described hereinabove with reference to FIG. 2. The goal of the function & utility analyzer 120 is to determine if a potential target gene is in fact a valid clinically useful target gene. Since a potential novel VGAM gene binding a binding site in the UTR of a target gene is understood to inhibit expression of that target gene, and if that target gene is shown to have a valid clinical utility, then in such a case it follows that the potential novel gene itself also has a valid useful function which is the opposite of that of the target gene.

[0124] The function & utility analyzer 120 preferably receives as input a plurality of potential novel target genes having binding-site/s 144, generated by the target-gene binding-site detector 118, both of FIG. 7A. Each potential gene, is evaluated as follows:

[0125] First the system first checks to see if the function of the potential target gene is scientifically well established. Preferably, this can be achieved bioinformatically by searching various published data sources presenting information on known function of proteins. Many such data sources exist and are published as is well known in the art.

[0126] Next, for those target genes the function of which is scientifically known and is well documented, the system then checks if scientific research data exists which links them to known diseases. For example, a preferred embodiment of the present invention utilizes the OMIM™ database published by NCBI, which summarizes research publications relating to genes which have been shown to be associated with diseases.

[0127] Finally, the specific possible utility of the target gene is evaluated. While this process too may be facilitated by bioinformatic means, it might require human evaluation of published scientific research regarding the target gene, in order to determine the utility of the target gene to the diagnosis and or treatment of specific disease. Only potential novel genes, the target-genes of which have passed all three examinations, are accepted as novel genes.

[0128] Reference is now made to FIG. 9, which is a simplified diagram describing a novel bioinformatically detected group of regulatory genes, referred to here as Genomic Record (GR) genes, that encode an “operon-like” cluster of novel miRNA-like genes, each modulating expression of a plurality of host target, the function and utility of which target genes is known.

[0129] GR GENE (Genomic Record Gene) is gene of a novel, bioinformatically detected group of regulatory, non protein coding, RNA genes. The method by which GR is detected is described hereinabove with reference to FIGS. 6-15.

[0130] GR GENE encodes an RNA molecule, typically several hundred nucleotides long, designated GR PRECURSOR RNA.

[0131] GR PRECURSOR RNA folds spatially, as illustrated by GR FOLDED PRECURSOR RNA, into a plurality of what is known in the art as “hair-pin” structures. The nucleotide sequence of GR PRECURSOR RNA comprises a plurality of segments, the first half of each such segment having a nucleotide sequence which is at least a partial inversed-reversed sequence of the second half thereof, thereby causing formation of a plurality of “hairpin” structures, as is well known in the art.

[0132] GR FOLDED PRECURSOR RNA is naturally processed by cellular enzymatic activity, into 3 separate hairpin shaped RNA segments, each corresponding to VGAM PRECURSOR RNA of FIG. 1, designated VGAM1 PRECURSOR, VGAM2 PRECURSOR and VGAM3 PRECURSOR respectively.

[0133] The above mentioned VGAM precursors, are diced by Dicer of FIG. 1, yielding short RNA segments of about 22 nucleotides in length, each corresponding to VGAM RNA of FIG. 1, designated VGAM1, VGAM2 and VGAM3 respectively.

[0134] VGAM1, VGAM2 and VGAM3 each bind complementarily to binding sites located in untranslated regions of respective host target, designated VGAM1-TARGET RNA, VGAM2-TARGET RNA and VGAM3-TARGET RNA respectively. This binding inhibits translation of the respective target proteins designated VGAM1-TARGET PROTEIN, VGAM2-TARGET PROTEIN and VGAM3-TARGET PROTEIN respectively.

[0135] The structure of VGAM genes comprised in a GR GENE, and their mode of modulation of expression of their respective target genes is described hereinabove with reference to FIG. 1. The bioinformatic approach to detection of VGAM genes comprised in a GR GENE is described hereinabove with reference to FIGS. 9 through 14.

[0136] The present invention discloses 427 novel viral genes of the GR group of genes, which have been detected bioinformatically, as described hereinbelow with reference to FIGS. 15 through 440. Laboratory confirmation of 3 genes of the GR group of genes is described hereinbelow with reference to FIGS. 9A through 14.

[0137] In summary, the current invention discloses a very large number of novel viral GR genes, each of which encodes a plurality of VGAM genes, which in turn may modulate expression of a plurality of host target proteins.

[0138] Reference is now made to FIG. 10 which is a block diagram illustrating different utilities of genes of the novel group of genes of the present invention referred to here as VGAM genes and GR genes.

[0139] The present invention discloses a first plurality of novel genes referred to here as VGAM genes, and a second plurality of operon-like genes referred to here as GR genes, each of the GR genes encoding a plurality of VGAM genes. The present invention further discloses a very large number of known target-genes, which are bound by, and the expression of which is modulated by each of the novel genes of the present invention. Published scientific data referenced by the present invention provides specific, substantial, and credible evidence that the abovementioned target genes modulated by novel genes of the present invention, are associated with various diseases. Specific novel genes of the present invention, target genes there of and diseases associated there with, are described hereinbelow with reference to FIGS. 15 through 363 It is therefore appreciated that a function of VGAM genes and GR genes of the present invention is modulation of expression of target genes related to known diseases, and that therefore utilities of novel genes of the present invention include diagnosis and treatment of the abovementioned diseases. FIG. 10 describes various types of diagnostic and therapeutic utilities of novel genes of the present invention.

[0140] A utility of novel genes of the present invention is detection of VGAM genes and of GR genes. It is appreciated that since VGAM genes and GR genes modulate expression of disease related target genes, that detection of expression of VGAM genes in clinical scenarios associated with said diseases is a specific, substantial and credible utility. Diagnosis of novel genes of the present invention may preferably be implemented by RNA expression detection techniques, including but not limited to biochips, as is well known in the art. Diagnosis of expression of genes of the present invention may be useful for research purposes, in order to further understand the connection between the novel genes of the present invention and the abovementioned related diseases, for disease diagnosis and prevention purposes, and for monitoring disease progress.

[0141] Another utility of novel genes of the present invention is anti-VGAM gene therapy, a mode of therapy which allows up regulation of a disease related target-gene of a novel VGAM gene of the present invention, by lowering levels of the novel VGAM gene which naturally inhibits expression of that target gene. This mode of therapy is particularly useful with respect to target genes which have been shown to be under-expressed in association with a specific disease. Anti-VGAM gene therapy is further discussed hereinbelow with reference to FIGS. 11A and 11B.

[0142] A further utility of novel genes of the present invention is VGAM replacement therapy, a mode of therapy which achieves down regulation of a disease related target-gene of a novel VGAM gene of the present invention, by raising levels of the VGAM gene which naturally inhibits expression of that target gene. This mode of therapy is particularly useful with respect to target genes which have been shown to be over-expressed in association with a specific disease. VGAM replacement therapy involves introduction of supplementary VGAM gene products into a cell, or stimulation of a cell to produce excess VGAM gene products. VGAM replacement therapy may preferably be achieved by transfecting cells with an artificial DNA molecule encoding a VGAM gene, which causes the cells to produce the VGAM gene product, as is well known in the art.

[0143] Yet a further utility of novel genes of the present invention is modified VGAM therapy. Disease conditions are likely to exist, in which a mutation in a binding site of a VGAM gene prevents natural VGAM gene to effectively bind inhibit a disease related target-gene, causing up regulation of that target gene, and thereby contributing to the disease pathology. In such conditions, a modified VGAM gene is designed which effectively binds the mutated VGAM binding site, i.e. is an effective anti-sense of the mutated VGAM binding site, and is introduced in disease effected cells. Modified VGAM therapy is preferably achieved by transfecting cells with an artificial DNA molecule encoding the modified VGAM gene, which causes the cells to produce the modified VGAM gene product, as is well known in the art.

[0144] An additional utility of novel genes of the present invention is induced cellular differentiation therapy. As aspect of the present invention is finding genes which determine cellular differentiation, as described hereinabove with reference to FIG. 11. Induced cellular differentiation therapy comprises transfection of cell with such VGAM genes thereby determining their differentiation as desired. It is appreciated that this approach may be widely applicable, inter alia as a means for auto transplantation harvesting cells of one cell-type from a patient, modifying their differentiation as desired, and then transplanting them back into the patient. It is further appreciated that this approach may also be utilized to modify cell differentiation in vivo, by transfecting cells in a genetically diseased tissue with a cell-differentiation determining VGAM gene, thus stimulating these cells to differentiate appropriately.

[0145] Reference is now made to FIGS. 11A and 11B, simplified diagrams which when taken together illustrate anti-VGAM gene therapy mentioned hereinabove with reference to FIG. 10. A utility of novel genes of the present invention is anti-VGAM gene therapy, a mode of therapy which allows up regulation of a disease related target-gene of a novel VGAM gene of the present invention, by lowering levels of the novel VGAM gene which naturally inhibits expression of that target gene. FIG. 11A shows a normal VGAM gene, inhibiting translation of a target gene of VGAM gene, by binding to a BINDING SITE found in an untranslated region of TARGET RNA, as described hereinabove with reference to FIG. 1.

[0146] FIG. 11B shows an example of anti-VGAM gene therapy. ANTI-VGAM RNA is short artificial RNA molecule the sequence of which is an anti-sense of VGAM RNA. Anti-VGAM treatment comprises transfecting diseased cells with ANTI-VGAM RNA, or with a DNA encoding thereof. The ANTI-VGAM RNA binds the natural VGAM RNA, thereby preventing binding of natural VGAM RNA to its BINDING SITE. This prevents natural translation inhibition of TARGET RNA by VGAM RNA, thereby up regulating expression of TARGET PROTEIN.

[0147] It is appreciated that anti-VGAM gene therapy is particularly useful with respect to target genes which have been shown to be under-expressed in association with a specific disease.

[0148] Reference is now made to FIG. 12A which is an annotated sequence of an EST comprising a novel gene detected by the gene detection system of the present invention. FIG. 12A shows the nucleotide sequence of a known human non-protein coding EST (Expressed Sequence Tag), identified as EST72223. It is appreciated that the sequence of this EST comprises sequences of one known miRNA gene, identified as MIR98, and of one novel GAM gene, referred to here as GAM24, detected by the bioinformatic gene detection system of the present invention, described hereinabove with reference to FIG. 2.

[0149] Reference is now made to FIGS. 12B and 12C that are pictures of laboratory results, which when taken together demonstrate laboratory confirmation of expression of the bioinformatically detected novel gene of FIG. 12A. Reference is now made to FIG. 12B which is a Northern blot analysis of MIR-98 and EST72223 transcripts. MIR-98 and EST72223 were reacted with MIR-98 and GAM24 probes as indicated in the figure. It is appreciated that the probes of both MIR-98 and GAM24 reacted with EST72223, indicating that EST72223 contains the sequences of MIR-98 and of GAM24. It is further appreciated that the probe of GAM24 does not cross-react with MIR-98.

[0150] Reference is now made to FIG. 12C. A Northern blot analysis of EST72223 and MIR-98 transfections were performed, subsequently marking RNA by the MIR-98 and GAM24 probes. Left, Northern reacted with MIR-98, Right, Northern reacted with GAM24. The molecular Sizes of EST72223, MIR-98 and GAM24 are indicated by arrows. Hela are control cells that have not been introduced to exogenous RNA. EST and MIR-98 Transfections are RNA obtained from Hela transfected with EST72223 and MIR-98, respectively. MIR-98 and EST are the transcripts used for the transfection experiment. The results indicate that EST72223, when transfected into Hela cells, is cut yielding known miRNA gene MIR-98 and novel miRNA gene GAM24.

[0151] Reference is now made to FIG. 12D, which is a Northern blot of a lisate experiment with MIR-98 and GAM24. Northern blot analysis of hairpins in EST72223. Left, Northern reacted with predicted Mir-98 hairpin probe, Right, Northern reacted with predicted GAM24 hairpin probe. The molecular size of EST is indicated by arrow. The molecular sizes of Mir-98 and GAM24 are 80 nt and 100 nt, respectively as indicated by arrows. The 22 nt molecular marker is indicated by arrow. 1-Hela lysate; 2-EST incubated 4 h with Hela lysate; 3-EST without lysate; 4-Mir transcript incubated 4 h with Hela lysate; 5-Mir transcript incubated overnight with Hela lysate; 6-Mir transcript without lysate; 7-RNA extracted from Hela cells following transfection with Mir transcript.

[0152] Technical methods used in experiments, the results of which are depicted in FIGS. 12B, 12C and 12D are as follows:

[0153] Transcript preparations: Digoxigenin (DIG) labeled transcripts were prepared from EST72223 (TIGER), MIR98 and predicted precursor hairpins by using a DIG RNA labeling kit (Roche Molecular Biochemicals) according to the manufacture's protocol. Briefly, PCR products with T7 promoter at the 5″ end or T3 promoter at the 3″end were prepared from each DNA in order to use it as a template to prepare sense and antisense transcripts, respectively. MIR-98 was amplified using EST72223 as a templet with T7miR98 forward primer: 5-″TAATACGACTCACTATAGGGTGAGGTAGTAAGTTGTATT GTT-3″ and T3miR98 revse primer: 5″-AATTAACCCTCACTAAAGGGAAAGTAGTAAGTTGTATAGTT-3″EST72223 was amplified with T7-EST 72223 forward primer: 5″-TAATACGACTCACTATAGGCCCTTATTAGAGGATTCTGCT-3″ and T3-EST72223 reverse primer: 5″-AATTAACCCTCACTAAAGGTTTTTTTTTCCTGAGACAGAGT-3″ Bet-4 was amplified using EST72223 as a templet with Bet-4 forward primer: 5″-GAGGCAGGAGAATTGCTTGA-3″ and T3-EST72223 reverse primer: 5″-AATTAACCCTCACTAAAGGCCTGAGACAGAGTCTTGCTC-3″ The PCR products were cleaned and used for DIG-labeled or unlabeled transcription reactions with the appropriate polymerase. For transfection experiments, CAP reaction was performed by using a mMassage mMachine kit (Ambion).

[0154] Transfection procedure: Transfection of Hela cells was performed by using TransMessenger reagent (Qiagen) according to the manufacture's protocol. Briefly, Hela cells were seeded to 1-2×10ˆ6 cells per plate a day before transfection. Two μg RNA transcripts were mixed with 8 μl Enhancer in a final volume of 100 μl, mixed and incubated at room temperature for 5 min. 16 μl TransMessenger reagent was added to the RNA-Enhancer, mixed and incubated for additional 10 min. Cell plates were washed with sterile PBS twice and then incubated with the transfection mix diluted with 2.5 ml DMEM medium without serum. Cells were incubated with transfection mix for three hours under their normal growth condition (370 C and 5% CO2) before the transfection mix was removed and a fresh DMEM medium containing serum was added to the cells. Cells were left to grow 48 hours before harvesting.

[0155] Target RNA cleavage assay: Cap-labeled target RNAs were generated using mMessage mMachine (Ambion). Caped RNA transcripts were preincubated at 30° C. for 15 min in supplemented Hela S100 obtained from Computer Cell Culture, Mos, Belgium. After addition of all components, final concentrations were 100 mM target RNA, 1 m M ATP, 0.2 mM GTP, 10 U/ml RNasin, 30 μg/ml creatine kinase, 25 mM creatine phosphate, and 50% S100 extract. Incubation was continued for 4 hours to overnight. Cleavage reaction was stopped by the addition of 8 volumes of proteinase K buffer (200 Mm Tris-Hcl, pH 7.5, 25 m M EDTA, 300 mM NaCl, and 2% SDS). Proteinase K, dissolved in 50 mM Tris-HCl, pH 8, 5 m M CaCl2, and 50% glycerol, was added to a final concentration of 0.6 mg/ml. Sample were subjected to phenol/chlorophorm extraction and kept frozen until analyzed by urea-TBE PAGE.

[0156] Northern analysis: RNAs were extracted from cells by using Tri-reagent according to the manufacture's protocol. The RNAs were dissolved in water and heated to 650 C to disrupt any association of the 25 nt RNA with larger RNA molecules. RNA were placed on ice and incubated for 30 min with PEG (MW=8000) in a final concentration of 5% and NaCl in a final concentration of 0.5M to precipitate high molecular weight nucleic acid. The RNAs were centrifuged at 10,000×g for 10 min to pellet the high molecular weight nucleic acid. The supernatant containing the low molecular weight RNAs was collected and three volumes of ethanol was added. The RNAs were placed at −200 C for at least two hours and then centrifuged at 10,000×g for 10 min. The pellets were dissolved in Urea-TBE buffer (1×tbe, 7M urea) for further analysis by a Northern blot.

[0157] RNA samples were boiled for 5 min before loading on 15%-8% polyacrylamide (19:1) gels containing 7M urea and 1×TBE. Gels were run in 1×TBE at a constant voltage of 300V and then transferred into a nylon membrane. The membrane was exposed to 3 min ultraviolet light to cross link the RNAs to the membrane. Hybridization was performed overnight with DIG-labeled probes at 420 C. Membranes were washed twice with SSC×2 and 0.2% SDS for 10 min. at 420 C and then washed twice with SSC×0.5 for 5 min at room temperature. The membrane was then developed by using a DIG luminescent detection kit (Roche) using anti DIG and CSPD reaction, according to the manufacture's protocol.

[0158] It is appreciated that the data presented in FIGS. 12A, 12B, 12C and 12D, when taken together validate the function of the bioinformatic gene detection engine 100 of FIG. 2. FIG. 12A shows a novel GAM gene bioinformatically detected by the bioinformatic gene detection engine 100, and FIGS. 12B, 12C and 12D show laboratory confirmation of the expression of this novel gene. This is in accord with the engine training and validation methodology described hereinabove with reference to FIG. 3.

[0159] Reference is now made to FIG. 13A which is an annotated sequence of an EST comprising a novel gene detected by the gene detection system of the present invention. FIG. 13A shows the nucleotide sequence of a known human non-protein coding EST (Expressed Sequence Tag), identified as EST 7929020. It is appreciated that the sequence of this EST comprises sequences of two novel GAM genes, referred to here as GAM23 and GAM25, detected by the bioinformatic gene detection system of the present invention, described hereinabove with reference to FIG. 2.

[0160] Reference is now made to FIG. 13B which presents pictures of laboratory results, that demonstrate laboratory confirmation of expression of the bioinformatically detected novel gene of FIG. 13A. Northern blot analysis of hairpins in EST7929020. Left, Northern reacted with predicted GAM25 hairpin probe, Right, Northern reacted with predicted GAM23 hairpin probe. The molecular size of EST is indicated by arrow. The molecular sizes of GAM23 and GAM25 are 60 nt, as indicated by arrow. The 22 nt molecular marker is indicated by arrow. 1-Hela lysate; 2-EST incubated 4 h with Hela lysate; 3-EST incubated overnight with Hela lysate; 4-EST without lysate; 5-GAM transcript; 6-GAM 22 nt marker; 7-GAM PCR probe; 8-RNA from control Hela cells; 9-RNA extracted from Hela cells following transfection with EST.

[0161] Reference is now made to FIG. 13C which is a picture of a Northern blot confirming Endogenous expression of bioinformatically detected gene GAM25 of FIG. 13A from in Hela cells. Northern was reacted with a predicted GAM25 hairpin probe. The molecular size of EST7929020 is indicated. The molecular sizes of GAM25 is 58 nt, as indicated. A 19 nt DNA oligo molecular marker is indicated. Endogenous expression of GAM25 in Hela total RNA fraction and in S-100 fraction is indicated by arrows. 1-GAM25 transcript; 2-GAM25 DNA oligo marker; 3-RNA from control Hela cells; 4-RNA extracted from Hela cells following transfection with EST; 5-RNA extracted from S-100 Hela lysate.

[0162] Reference is now made to FIG. 14A which is an annotated sequence of an EST comprising a novel gene detected by the gene detection system of the present invention. FIG. 14A shows the nucleotide sequence of a known human non-protein coding EST (Expressed Sequence Tag), identified as EST 1388749. It is appreciated that the sequence of this EST comprises sequence of a novel GAM gene, referred to here as GAM26, detected by the bioinformatic gene detection system of the present invention, described hereinabove with reference to FIG. 2.

[0163] Reference is now made to FIG. 14B which is a picture of Northern blot analysis, confirming expression of novel bioinformatically detected gene GAM26, and natural processing there of from EST1388749. Northern reacted with predicted GAM26 hairpin probe. The molecular size of EST is indicated by arrow. The molecular sizes of GAM26 is 130 nt, as indicated by arrow. The 22 nt molecular marker is indicated by arrow. 1-Hela lysate; 2-EST incubated 4 h with Hela lysate; 3-EST incubated overnight with Hela lysate; 4-EST without lysate; 5-GAM transcript; 6-GAM 22 nt marker; 7-GAM PCR probe.

[0164] FIG. 1 further provides a conceptual description of a novel bioinformatically detected viral gene of the present invention, referred to here as Viral Genomic Address Messenger 15 (VGAM15) viral gene, which modulates expression of respective host target genes thereof, the function and utility of which host target genes is known in the art.

[0165] VGAM15 is a novel bioinformatically detected regulatory, non protein coding, viral micro RNA (miRNA) gene. The method by which VGAM15 was detected is described hereinabove with reference to FIGS. 2-8.

[0166] VGAM15 gene, herein designated VGAM GENE, is a viral gene contained in the genome of Vaccinia virus. VGAM15 host target gene, herein designated VGAM HOST TARGET GENE, is a human gene contained in the human genome.

[0167] VGAM15 gene, herein designated VGAM GENE, encodes a VGAM15 precursor RNA, herein designated VGAM PRECURSOR RNA. Similar to other miRNA genes, and unlike most ordinary genes, VGAM15 precursor RNA, herein designated VGAM PRECURSOR RNA, does not encode a protein. A nucleotide sequence identical or highly similar to the nucleotide sequence of VGAM15 precursor RNA is designated SEQ ID:1, and is provided hereinbelow with reference to the sequence listing part. Nucleotide sequence SEQ ID:1 is located at position 190678 relative to the genome of Vaccinia virus.

[0168] VGAM15 precursor RNA, herein designated VGAM PRECURSOR RNA, folds onto itself, forming VGAM15 folded precursor RNA, herein designated VGAM FOLDED PRECURSOR RNA, which has a two-dimensional hairpin structure. As is well known in the art, this hairpin structure, is typical of RNA encoded by miRNA genes, and is due to the fact that the nucleotide sequence of the first half of the RNA encoded by a miRNA gene is an accurate or partial inversed-reversed sequence of the nucleotide sequence of the second half thereof.

[0169] An enzyme complex designated DICER COMPLEX, dices the VGAM15 folded precursor RNA, herein designated VGAM FOLDED PRECURSOR RNA, into VGAM15 RNA, herein designated VGAM RNA, a single stranded ˜22 nt long RNA segment. As is known in the art, dicing of a hairpin structured RNA precursor product into a short ˜22 nt RNA segment is catalyzed by an enzyme complex comprising an enzyme called Dicer together with other necessary proteins. A probable (over 83%) nucleotide sequence of VGAM15 RNA is designated SEQ ID:350, and is provided hereinbelow with reference to the sequence listing part.

[0170] VGAM15 host target gene, herein designated VGAM HOST TARGET GENE, encodes a corresponding messenger RNA, VGAM15 host target RNA, herein designated VGAM HOST TARGET RNA. VGAM15 host target RNA, herein designated VGAM HOST TARGET RNA, comprises three regions, as is typical of mRNA of a protein coding gene: a 5 untranslated region, a protein coding region and a 3 untranslated region, designated 5UTR, PROTEIN CODING and 3UTR respectively.

[0171] VGAM15 RNA, herein designated VGAM RNA, binds complementarily to one or more host target binding sites located in untranslated regions of VGAM15 host target RNA, herein designated VGAM HOST TARGET RNA. This complementary binding is due to the fact that the nucleotide sequence of VGAM15 RNA, herein designated VGAM RNA, is an accurate or a partial inversed-reversed sequence of the nucleotide sequence of each of the host target binding sites. As an illustration, FIG. 1 shows 3 such host target binding sites, designated BINDING SITE I, BINDING SITE II and BINDING SITE III respectively. It is appreciated that the number of host target binding sites shown in FIG. 1 is meant as an illustration only, and is not meant to be limiting VGAM15 RNA, herein designated VGAM RNA, may have a different number of host target binding sites in untranslated regions of a VGAM15 host target RNA, herein designated VGAM HOST TARGET RNA. It is further appreciated that while FIG. 1 depicts host target binding sites in the 3UTR region, this is meant as an example only these host target binding sites may be located in the 3UTR region, the 5UTR region, or in both 3UTR and 5UTR regions.

[0172] The complementary binding of VGAM15 RNA, herein designated VGAM RNA, to host target binding sites on VGAM15 host target RNA, herein designated VGAM HOST TARGET RNA, such as BINDING SITE I, BINDING SITE II and BINDING SITE III, inhibits translation of VGAM15 host target RNA, herein designated VGAM HOST TARGET RNA, into VGAM15 host target protein, herein designated VGAM HOST TARGET PROTEIN. VGAM host target protein is therefore outlined by a broken line.

[0173] It is appreciated that VGAM15 host target gene, herein designated VGAM HOST TARGET GENE, in fact represents a plurality of VGAM15 host target genes. The mRNA of each one of this plurality of VGAM15 host target genes comprises one or more host target binding sites, each having a nucleotide sequence which is at least partly complementary to VGAM15 RNA, herein designated VGAM RNA, and which when bound by VGAM15 RNA, herein designated VGAM RNA, causes inhibition of translation of respective one or more VGAM15 host target proteins.

[0174] It is further appreciated by one skilled in the art that the mode of translational inhibition illustrated by FIG. 1 with specific reference to translational inhibition exerted by VGAM15 gene, herein designated VGAM GENE, on one or more VGAM15 host target gene, herein designated VGAM HOST TARGET GENE, is in fact common to other known non-viral miRNA genes. As mentioned hereinabove with reference to the background section, although a specific complementary binding site has been demonstrated only for some of the known miRNA genes (primarily Lin-4 and Let-7), all other recently discovered miRNA genes are also believed by those skilled in the art to modulate expression of other genes by complementary binding, although specific complementary binding sites of these other miRNA genes have not yet been found (Ruvkun G., Perspective: Glimpses of a tiny RNA world, Science 294, 779 (2001)).

[0175] It is yet further appreciated that a function of VGAM15 is inhibition of expression of host target genes, as part of a novel viral mechanism of attacking a host. Accordingly, utilities of VGAM15 include diagnosis, prevention and treatment of viral infection by Vaccinia virus. Specific functions, and accordingly utilities, of VGAM15 correlate with, and may be deduced from, the identity of the host target genes which VGAM15 binds and inhibits, and the function of these host target genes, as elaborated hereinbelow.

[0176] Nucleotide sequences of the VGAM15 precursor RNA, herein designated VGAM PRECURSOR RNA, and of the diced VGAM15 RNA, herein designated VGAM RNA, and a schematic representation of the secondary folding of VGAM15 folded precursor RNA, herein designated VGAM FOLDED PRECURSOR RNA, of VGAM15 are further described hereinbelow with reference to Table 1.

[0177] Nucleotide sequences of host target binding sites, such as BINDING SITE-I, BINDING SITE-II and BINDING SITE-III of FIG. 1, found on, and schematic representation of the complementarity of each of these host target binding sites to VGAM15 RNA, herein designated VGAM RNA, are described hereinbelow with reference to Table 2.

[0178] FIG. 1 further provides a conceptual description of another novel bioinformatically detected viral gene of the present invention, referred to here as Viral Genomic Address Messenger 16 (VGAM16) viral gene, which modulates expression of respective host target genes thereof, the function and utility of which host target genes is known in the art.

[0179] VGAM16 is a novel bioinformatically detected regulatory, non protein coding, viral micro RNA (miRNA) gene. The method by which VGAM16 was detected is described hereinabove with reference to FIGS. 2-8.

[0180] VGAM16 gene, herein designated VGAM GENE, is a viral gene contained in the genome of Vaccinia virus. VGAM16 host target gene, herein designated VGAM HOST TARGET GENE, is a human gene contained in the human genome.

[0181] VGAM16 gene, herein designated VGAM GENE, encodes a VGAM16 precursor RNA, herein designated VGAM PRECURSOR RNA. Similar to other miRNA genes, and unlike most ordinary genes, VGAM16 precursor RNA, herein designated VGAM PRECURSOR RNA, does not encode a protein. A nucleotide sequence identical or highly similar to the nucleotide sequence of VGAM16 precursor RNA is designated SEQ ID:2, and is provided hereinbelow with reference to the sequence listing part. Nucleotide sequence SEQ ID:2 is located at position 188927 relative to the genome of Vaccinia virus.

[0182] VGAM16 precursor RNA, herein designated VGAM PRECURSOR RNA, folds onto itself, forming VGAM16 folded precursor RNA, herein designated VGAM FOLDED PRECURSOR RNA, which has a two-dimensional hairpin structure. As is well known in the art, this hairpin structure, is typical of RNA encoded by miRNA genes, and is due to the fact that the nucleotide sequence of the first half of the RNA encoded by a miRNA gene is an accurate or partial inversed-reversed sequence of the nucleotide sequence of the second half thereof.

[0183] An enzyme complex designated DICER COMPLEX, dices the VGAM16 folded precursor RNA, herein designated VGAM FOLDED PRECURSOR RNA, into VGAM16 RNA, herein designated VGAM RNA, a single stranded ˜22 nt long RNA segment. As is known in the art, dicing of a hairpin structured RNA precursor product into a short ˜22 nt RNA segment is catalyzed by an enzyme complex comprising an enzyme called Dicer together with other necessary proteins. A probable (over 84%) nucleotide sequence of VGAM16 RNA is designated SEQ ID:351, and is provided hereinbelow with reference to the sequence listing part.

[0184] VGAM16 host target gene, herein designated VGAM HOST TARGET GENE, encodes a corresponding messenger RNA, VGAM16 host target RNA, herein designated VGAM HOST TARGET RNA. VGAM16 host target RNA, herein designated VGAM HOST TARGET RNA, comprises three regions, as is typical of mRNA of a protein coding gene: a 5 untranslated region, a protein coding region and a 3 untranslated region, designated 5UTR, PROTEIN CODING and 3UTR respectively.

[0185] VGAM16 RNA, herein designated VGAM RNA, binds complementarily to one or more host target binding sites located in untranslated regions of VGAM16 host target RNA, herein designated VGAM HOST TARGET RNA. This complementary binding is due to the fact that the nucleotide sequence of VGAM16 RNA, herein designated VGAM RNA, is an accurate or a partial inversed-reversed sequence of the nucleotide sequence of each of the host target binding sites. As an illustration, FIG. 1 shows 3 such host target binding sites, designated BINDING SITE I, BINDING SITE II and BINDING SITE III respectively. It is appreciated that the number of host target binding sites shown in FIG. 1 is meant as an illustration only, and is not meant to be limiting VGAM16 RNA, herein designated VGAM RNA, may have a different number of host target binding sites in untranslated regions of a VGAM16 host target RNA, herein designated VGAM HOST TARGET RNA. It is further appreciated that while FIG. 1 depicts host target binding sites in the 3UTR region, this is meant as an example only these host target binding sites may be located in the 3UTR region, the 5UTR region, or in both 3UTR and 5UTR regions.

[0186] The complementary binding of VGAM16 RNA, herein designated VGAM RNA, to host target binding sites on VGAM16 host target RNA, herein designated VGAM HOST TARGET RNA, such as BINDING SITE I, BINDING SITE II and BINDING SITE III, inhibits translation of VGAM16 host target RNA, herein designated VGAM HOST TARGET RNA, into VGAM16 host target protein, herein designated VGAM HOST TARGET PROTEIN. VGAM host target protein is therefore outlined by a broken line.

[0187] It is appreciated that VGAM16 host target gene, herein designated VGAM HOST TARGET GENE, in fact represents a plurality of VGAM16 host target genes. The mRNA of each one of this plurality of VGAM16 host target genes comprises one or more host target binding sites, each having a nucleotide sequence which is at least partly complementary to VGAM16 RNA, herein designated VGAM RNA, and which when bound by VGAM16 RNA, herein designated VGAM RNA, causes inhibition of translation of respective one or more VGAM16 host target proteins.

[0188] It is further appreciated by one skilled in the art that the mode of translational inhibition illustrated by FIG. 1 with specific reference to translational inhibition exerted by VGAM16 gene, herein designated VGAM GENE, on one or more VGAM16 host target gene, herein designated VGAM HOST TARGET GENE, is in fact common to other known non-viral miRNA genes. As mentioned hereinabove with reference to the background section, although a specific complementary binding site has been demonstrated only for some of the known miRNA genes (primarily Lin-4 and Let-7), all other recently discovered miRNA genes are also believed by those skilled in the art to modulate expression of other genes by complementary binding, although specific complementary binding sites of these other miRNA genes have not yet been found (Ruvkun G., Perspective: Glimpses of a tiny RNA world, Science 294, 779 (2001)).

[0189] It is yet further appreciated that a function of VGAM16 is inhibition of expression of host target genes, as part of a novel viral mechanism of attacking a host. Accordingly, utilities of VGAM16 include diagnosis, prevention and treatment of viral infection by Vaccinia virus. Specific functions, and accordingly utilities, of VGAM16 correlate with, and may be deduced from, the identity of the host target genes which VGAM16 binds and inhibits, and the function of these host target genes, as elaborated hereinbelow.

[0190] Nucleotide sequences of the VGAM16 precursor RNA, herein designated VGAM PRECURSOR RNA, and of the diced VGAM16 RNA, herein designated VGAM RNA, and a schematic representation of the secondary folding of VGAM16 folded precursor RNA, herein designated VGAM FOLDED PRECURSOR RNA, of VGAM16 are further described hereinbelow with reference to Table 1.

[0191] Nucleotide sequences of host target binding sites, such as BINDING SITE-I, BINDING SITE-II and BINDING SITE-III of FIG. 1, found on, and schematic representation of the complementarity of each of these host target binding sites to VGAM16 RNA, herein designated VGAM RNA, are described hereinbelow with reference to Table 2.

[0192] FIG. 1 further provides a conceptual description of another novel bioinformatically detected viral gene of the present invention, referred to here as Viral Genomic Address Messenger 17 (VGAM17) viral gene, which modulates expression of respective host target genes thereof, the function and utility of which host target genes is known in the art.

[0193] VGAM17 is a novel bioinformatically detected regulatory, non protein coding, viral micro RNA (miRNA) gene. The method by which VGAM17 was detected is described hereinabove with reference to FIGS. 2-8.

[0194] VGAM17 gene, herein designated VGAM GENE, is a viral gene contained in the genome of Vaccinia virus. VGAM17 host target gene, herein designated VGAM HOST TARGET GENE, is a human gene contained in the human genome.

[0195] VGAM17 gene, herein designated VGAM GENE, encodes a VGAM17 precursor RNA, herein designated VGAM PRECURSOR RNA. Similar to other miRNA genes, and unlike most ordinary genes, VGAM17 precursor RNA, herein designated VGAM PRECURSOR RNA, does not encode a protein. A nucleotide sequence identical or highly similar to the nucleotide sequence of VGAM17 precursor RNA is designated SEQ ID:3, and is provided hereinbelow with reference to the sequence listing part. Nucleotide sequence SEQ ID:3 is located at position 188927 relative to the genome of Vaccinia virus.

[0196] VGAM17 precursor RNA, herein designated VGAM PRECURSOR RNA, folds onto itself, forming VGAM17 folded precursor RNA, herein designated VGAM FOLDED PRECURSOR RNA, which has a two-dimensional hairpin structure. As is well known in the art, this hairpin structure, is typical of RNA encoded by miRNA genes, and is due to the fact that the nucleotide sequence of the first half of the RNA encoded by a miRNA gene is an accurate or partial inversed-reversed sequence of the nucleotide sequence of the second half thereof.

[0197] An enzyme complex designated DICER COMPLEX, dices the VGAM17 folded precursor RNA, herein designated VGAM FOLDED PRECURSOR RNA, into VGAM17 RNA, herein designated VGAM RNA, a single stranded ˜22 nt long RNA segment. As is known in the art, dicing of a hairpin structured RNA precursor product into a short ˜22 nt RNA segment is catalyzed by an enzyme complex comprising an enzyme called Dicer together with other necessary proteins. A probable (over 84%) nucleotide sequence of VGAM17 RNA is designated SEQ ID:352, and is provided hereinbelow with reference to the sequence listing part.

[0198] VGAM17 host target gene, herein designated VGAM HOST TARGET GENE, encodes a corresponding messenger RNA, VGAM17 host target RNA, herein designated VGAM HOST TARGET RNA. VGAM17 host target RNA, herein designated VGAM HOST TARGET RNA, comprises three regions, as is typical of mRNA of a protein coding gene: a 5 untranslated region, a protein coding region and a 3 untranslated region, designated 5UTR, PROTEIN CODING and 3UTR respectively.

[0199] VGAM17 RNA, herein designated VGAM RNA, binds complementarily to one or more host target binding sites located in untranslated regions of VGAM17 host target RNA, herein designated VGAM HOST TARGET RNA. This complementary binding is due to the fact that the nucleotide sequence of VGAM17 RNA, herein designated VGAM RNA, is an accurate or a partial inversed-reversed sequence of the nucleotide sequence of each of the host target binding sites. As an illustration, FIG. 1 shows 3 such host target binding sites, designated BINDING SITE I, BINDING SITE II and BINDING SITE III respectively. It is appreciated that the number of host target binding sites shown in FIG. 1 is meant as an illustration only, and is not meant to be limiting VGAM17 RNA, herein designated VGAM RNA, may have a different number of host target binding sites in untranslated regions of a VGAM17 host target RNA, herein designated VGAM HOST TARGET RNA. It is further appreciated that while FIG. 1 depicts host target binding sites in the 3UTR region, this is meant as an example only these host target binding sites may be located in the 3UTR region, the 5UTR region, or in both 3UTR and 5UTR regions.

[0200] The complementary binding of VGAM17 RNA, herein designated VGAM RNA, to host target binding sites on VGAM17 host target RNA, herein designated VGAM HOST TARGET RNA, such as BINDING SITE I, BINDING SITE II and BINDING SITE III, inhibits translation of VGAM17 host target RNA, herein designated VGAM HOST TARGET RNA, into VGAM17 host target protein, herein designated VGAM HOST TARGET PROTEIN. VGAM host target protein is therefore outlined by a broken line.

[0201] It is appreciated that VGAM17 host target gene, herein designated VGAM HOST TARGET GENE, in fact represents a plurality of VGAM17 host target genes. The mRNA of each one of this plurality of VGAM17 host target genes comprises one or more host target binding sites, each having a nucleotide sequence which is at least partly complementary to VGAM17 RNA, herein designated VGAM RNA, and which when bound by VGAM17 RNA, herein designated VGAM RNA, causes inhibition of translation of respective one or more VGAM17 host target proteins.

[0202] It is further appreciated by one skilled in the art that the mode of translational inhibition illustrated by FIG. 1 with specific reference to translational inhibition exerted by VGAM17 gene, herein designated VGAM GENE, on one or more VGAM17 host target gene, herein designated VGAM HOST TARGET GENE, is in fact common to other known non-viral miRNA genes. As mentioned hereinabove with reference to the background section, although a specific complementary binding site has been demonstrated only for some of the known miRNA genes (primarily Lin-4 and Let-7), all other recently discovered miRNA genes are also believed by those skilled in the art to modulate expression of other genes by complementary binding, although specific complementary binding sites of these other miRNA genes have not yet been found (Ruvkun G., Perspective: Glimpses of a tiny RNA world, Science 294, 779 (2001)).

[0203] It is yet further appreciated that a function of VGAM17 is inhibition of expression of host target genes, as part of a novel viral mechanism of attacking a host. Accordingly, utilities of VGAM17 include diagnosis, prevention and treatment of viral infection by Vaccinia virus. Specific functions, and accordingly utilities, of VGAM17 correlate with, and may be deduced from, the identity of the host target genes which VGAM17 binds and inhibits, and the function of these host target genes, as elaborated hereinbelow.

[0204] Nucleotide sequences of the VGAM17 precursor RNA, herein designated VGAM PRECURSOR RNA, and of the diced VGAM17 RNA, herein designated VGAM RNA, and a schematic representation of the secondary folding of VGAM17 folded precursor RNA, herein designated VGAM FOLDED PRECURSOR RNA, of VGAM17 are further described hereinbelow with reference to Table 1.

[0205] Nucleotide sequences of host target binding sites, such as BINDING SITE-I, BINDING SITE-II and BINDING SITE-III of FIG. 1, found on, and schematic representation of the complementarity of each of these host target binding sites to VGAM17 RNA, herein designated VGAM RNA, are described hereinbelow with reference to Table 2.

[0206] FIG. 1 further provides a conceptual description of another novel bioinformatically detected viral gene of the present invention, referred to here as Viral Genomic Address Messenger 18 (VGAM18) viral gene, which modulates expression of respective host target genes thereof, the function and utility of which host target genes is known in the art.

[0207] VGAM18 is a novel bioinformatically detected regulatory, non protein coding, viral micro RNA (miRNA) gene. The method by which VGAM18 was detected is described hereinabove with reference to FIGS. 2-8.

[0208] VGAM18 gene, herein designated VGAM GENE, is a viral gene contained in the genome of Vaccinia virus. VGAM18 host target gene, herein designated VGAM HOST TARGET GENE, is a human gene contained in the human genome.

[0209] VGAM18 gene, herein designated VGAM GENE, encodes a VGAM18 precursor RNA, herein designated VGAM PRECURSOR RNA. Similar to other miRNA genes, and unlike most ordinary genes, VGAM18 precursor RNA, herein designated VGAM PRECURSOR RNA, does not encode a protein. A nucleotide sequence identical or highly similar to the nucleotide sequence of VGAM18 precursor RNA is designated SEQ ID:4, and is provided hereinbelow with reference to the sequence listing part. Nucleotide sequence SEQ ID:4 is located at position 188927 relative to the genome of Vaccinia virus.

[0210] VGAM18 precursor RNA, herein designated VGAM PRECURSOR RNA, folds onto itself, forming VGAM18 folded precursor RNA, herein designated VGAM FOLDED PRECURSOR RNA, which has a two-dimensional hairpin structure. As is well known in the art, this hairpin structure, is typical of RNA encoded by miRNA genes, and is due to the fact that the nucleotide sequence of the first half of the RNA encoded by a miRNA gene is an accurate or partial inversed-reversed sequence of the nucleotide sequence of the second half thereof.

[0211] An enzyme complex designated DICER COMPLEX, dices the VGAM18 folded precursor RNA, herein designated VGAM FOLDED PRECURSOR RNA, into VGAM18 RNA, herein designated VGAM RNA, a single stranded ˜22 nt long RNA segment. As is known in the art, dicing of a hairpin structured RNA precursor product into a short ˜22 nt RNA segment is catalyzed by an enzyme complex comprising an enzyme called Dicer together with other necessary proteins. A probable (over 84%) nucleotide sequence of VGAM18 RNA is designated SEQ ID:353, and is provided hereinbelow with reference to the sequence listing part.

[0212] VGAM18 host target gene, herein designated VGAM HOST TARGET GENE, encodes a corresponding messenger RNA, VGAM18 host target RNA, herein designated VGAM HOST TARGET RNA. VGAM18 host target RNA, herein designated VGAM HOST TARGET RNA, comprises three regions, as is typical of mRNA of a protein coding gene: a 5 untranslated region, a protein coding region and a 3 untranslated region, designated 5UTR, PROTEIN CODING and 3UTR respectively.

[0213] VGAM18 RNA, herein designated VGAM RNA, binds complementarily to one or more host target binding sites located in untranslated regions of VGAM18 host target RNA, herein designated VGAM HOST TARGET RNA. This complementary binding is due to the fact that the nucleotide sequence of VGAM18 RNA, herein designated VGAM RNA, is an accurate or a partial inversed-reversed sequence of the nucleotide sequence of each of the host target binding sites. As an illustration, FIG. 1 shows 3 such host target binding sites, designated BINDING SITE I, BINDING SITE II and BINDING SITE III respectively. It is appreciated that the number of host target binding sites shown in FIG. 1 is meant as an illustration only, and is not meant to be limiting VGAM18 RNA, herein designated VGAM RNA, may have a different number of host target binding sites in untranslated regions of a VGAM18 host target RNA, herein designated VGAM HOST TARGET RNA. It is further appreciated that while FIG. 1 depicts host target binding sites in the 3UTR region, this is meant as an example only these host target binding sites may be located in the 3UTR region, the 5UTR region, or in both 3UTR and 5UTR regions.

[0214] The complementary binding of VGAM18 RNA, herein designated VGAM RNA, to host target binding sites on VGAM18 host target RNA, herein designated VGAM HOST TARGET RNA, such as BINDING SITE I, BINDING SITE II and BINDING SITE III, inhibits translation of VGAM18 host target RNA, herein designated VGAM HOST TARGET RNA, into VGAM18 host target protein, herein designated VGAM HOST TARGET PROTEIN. VGAM host target protein is therefore outlined by a broken line.

[0215] It is appreciated that VGAM18 host target gene, herein designated VGAM HOST TARGET GENE, in fact represents a plurality of VGAM18 host target genes. The mRNA of each one of this plurality of VGAM18 host target genes comprises one or more host target binding sites, each having a nucleotide sequence which is at least partly complementary to VGAM18 RNA, herein designated VGAM RNA, and which when bound by VGAM18 RNA, herein designated VGAM RNA, causes inhibition of translation of respective one or more VGAM18 host target proteins.

[0216] It is further appreciated by one skilled in the art that the mode of translational inhibition illustrated by FIG. 1 with specific reference to translational inhibition exerted by VGAM18 gene, herein designated VGAM GENE, on one or more VGAM18 host target gene, herein designated VGAM HOST TARGET GENE, is in fact common to other known non-viral miRNA genes. As mentioned hereinabove with reference to the background section, although a specific complementary binding site has been demonstrated only for some of the known miRNA genes (primarily Lin-4 and Let-7), all other recently discovered miRNA genes are also believed by those skilled in the art to modulate expression of other genes by complementary binding, although specific complementary binding sites of these other miRNA genes have not yet been found (Ruvkun G., Perspective: Glimpses of a tiny RNA world, Science 294, 779 (2001)).

[0217] It is yet further appreciated that a function of VGAM18 is inhibition of expression of host target genes, as part of a novel viral mechanism of attacking a host. Accordingly, utilities of VGAM18 include diagnosis, prevention and treatment of viral infection by Vaccinia virus. Specific functions, and accordingly utilities, of VGAM18 correlate with, and may be deduced from, the identity of the host target genes which VGAM18 binds and inhibits, and the function of these host target genes, as elaborated hereinbelow.

[0218] Nucleotide sequences of the VGAM18 precursor RNA, herein designated VGAM PRECURSOR RNA, and of the diced VGAM18 RNA, herein designated VGAM RNA, and a schematic representation of the secondary folding of VGAM18 folded precursor RNA, herein designated VGAM FOLDED PRECURSOR RNA, of VGAM18 are further described hereinbelow with reference to Table 1.

[0219] Nucleotide sequences of host target binding sites, such as BINDING SITE-I, BINDING SITE-II and BINDING SITE-III of FIG. 1, found on, and schematic representation of the complementarity of each of these host target binding sites to VGAM18 RNA, herein designated VGAM RNA, are described hereinbelow with reference to Table 2.

[0220] FIG. 1 further provides a conceptual description of another novel bioinformatically detected viral gene of the present invention, referred to here as Viral Genomic Address Messenger 19 (VGAM19) viral gene, which modulates expression of respective host target genes thereof, the function and utility of which host target genes is known in the art.

[0221] VGAM19 is a novel bioinformatically detected regulatory, non protein coding, viral micro RNA (miRNA) gene. The method by which VGAM19 was detected is described hereinabove with reference to FIGS. 2-8.

[0222] VGAM19 gene, herein designated VGAM GENE, is a viral gene contained in the genome of Vaccinia virus. VGAM19 host target gene, herein designated VGAM HOST TARGET GENE, is a human gene contained in the human genome.

[0223] VGAM19 gene, herein designated VGAM GENE, encodes a VGAM19 precursor RNA, herein designated VGAM PRECURSOR RNA. Similar to other miRNA genes, and unlike most ordinary genes, VGAM19 precursor RNA, herein designated VGAM PRECURSOR RNA, does not encode a protein. A nucleotide sequence identical or highly similar to the nucleotide sequence of VGAM19 precursor RNA is designated SEQ ID:5, and is provided hereinbelow with reference to the sequence listing part. Nucleotide sequence SEQ ID:5 is located at position 188927 relative to the genome of Vaccinia virus.

[0224] VGAM19 precursor RNA, herein designated VGAM PRECURSOR RNA, folds onto itself, forming VGAM19 folded precursor RNA, herein designated VGAM FOLDED PRECURSOR RNA, which has a two-dimensional hairpin structure. As is well known in the art, this hairpin structure, is typical of RNA encoded by miRNA genes, and is due to the fact that the nucleotide sequence of the first half of the RNA encoded by a miRNA gene is an accurate or partial inversed-reversed sequence of the nucleotide sequence of the second half thereof.

[0225] An enzyme complex designated DICER COMPLEX, dices the VGAM19 folded precursor RNA, herein designated VGAM FOLDED PRECURSOR RNA, into VGAM19 RNA, herein designated VGAM RNA, a single stranded ˜22 nt long RNA segment. As is known in the art, dicing of a hairpin structured RNA precursor product into a short ˜22 nt RNA segment is catalyzed by an enzyme complex comprising an enzyme called Dicer together with other necessary proteins. A probable (over 84%) nucleotide sequence of VGAM19 RNA is designated SEQ ID:354, and is provided hereinbelow with reference to the sequence listing part.

[0226] VGAM19 host target gene, herein designated VGAM HOST TARGET GENE, encodes a corresponding messenger RNA, VGAM19 host target RNA, herein designated VGAM HOST TARGET RNA. VGAM19 host target RNA, herein designated VGAM HOST TARGET RNA, comprises three regions, as is typical of mRNA of a protein coding gene: a 5 untranslated region, a protein coding region and a 3 untranslated region, designated 5UTR, PROTEIN CODING and 3UTR respectively.

[0227] VGAM19 RNA, herein designated VGAM RNA, binds complementarily to one or more host target binding sites located in untranslated regions of VGAM19 host target RNA, herein designated VGAM HOST TARGET RNA. This complementary binding is due to the fact that the nucleotide sequence of VGAM19 RNA, herein designated VGAM RNA, is an accurate or a partial inversed-reversed sequence of the nucleotide sequence of each of the host target binding sites. As an illustration, FIG. 1 shows 3 such host target binding sites, designated BINDING SITE I, BINDING SITE II and BINDING SITE III respectively. It is appreciated that the number of host target binding sites shown in FIG. 1 is meant as an illustration only, and is not meant to be limiting VGAM19 RNA, herein designated VGAM RNA, may have a different number of host target binding sites in untranslated regions of a VGAM19 host target RNA, herein designated VGAM HOST TARGET RNA. It is further appreciated that while FIG. 1 depicts host target binding sites in the 3UTR region, this is meant as an example only these host target binding sites may be located in the 3UTR region, the 5UTR region, or in both 3UTR and 5UTR regions.

[0228] The complementary binding of VGAM19 RNA, herein designated VGAM RNA, to host target binding sites on VGAM19 host target RNA, herein designated VGAM HOST TARGET RNA, such as BINDING SITE I, BINDING SITE II and BINDING SITE III, inhibits translation of VGAM19 host target RNA, herein designated VGAM HOST TARGET RNA, into VGAM19 host target protein, herein designated VGAM HOST TARGET PROTEIN. VGAM host target protein is therefore outlined by a broken line.

[0229] It is appreciated that VGAM19 host target gene, herein designated VGAM HOST TARGET GENE, in fact represents a plurality of VGAM19 host target genes. The mRNA of each one of this plurality of VGAM19 host target genes comprises one or more host target binding sites, each having a nucleotide sequence which is at least partly complementary to VGAM19 RNA, herein designated VGAM RNA, and which when bound by VGAM19 RNA, herein designated VGAM RNA, causes inhibition of translation of respective one or more VGAM19 host target proteins.

[0230] It is further appreciated by one skilled in the art that the mode of translational inhibition illustrated by FIG. 1 with specific reference to translational inhibition exerted by VGAM19 gene, herein designated VGAM GENE, on one or more VGAM19 host target gene, herein designated VGAM HOST TARGET GENE, is in fact common to other known non-viral miRNA genes. As mentioned hereinabove with reference to the background section, although a specific complementary binding site has been demonstrated only for some of the known miRNA genes (primarily Lin-4 and Let-7), all other recently discovered miRNA genes are also believed by those skilled in the art to modulate expression of other genes by complementary binding, although specific complementary binding sites of these other miRNA genes have not yet been found (Ruvkun G., Perspective: Glimpses of a tiny RNA world, Science 294, 779 (2001)).

[0231] It is yet further appreciated that a function of VGAM19 is inhibition of expression of host target genes, as part of a novel viral mechanism of attacking a host. Accordingly, utilities of VGAM19 include diagnosis, prevention and treatment of viral infection by Vaccinia virus. Specific functions, and accordingly utilities, of VGAM19 correlate with, and may be deduced from, the identity of the host target genes which VGAM19 binds and inhibits, and the function of these host target genes, as elaborated hereinbelow.

[0232] Nucleotide sequences of the VGAM19 precursor RNA, herein designated VGAM PRECURSOR RNA, and of the diced VGAM19 RNA, herein designated VGAM RNA, and a schematic representation of the secondary folding of VGAM19 folded precursor RNA, herein designated VGAM FOLDED PRECURSOR RNA, of VGAM19 are further described hereinbelow with reference to Table 1.

[0233] Nucleotide sequences of host target binding sites, such as BINDING SITE-I, BINDING SITE-II and BINDING SITE-III of FIG. 1, found on, and schematic representation of the complementarity of each of these host target binding sites to VGAM19 RNA, herein designated VGAM RNA, are described hereinbelow with reference to Table 2.

[0234] FIG. 1 further provides a conceptual description of another novel bioinformatically detected viral gene of the present invention, referred to here as Viral Genomic Address Messenger 20 (VGAM20) viral gene, which modulates expression of respective host target genes thereof, the function and utility of which host target genes is known in the art.

[0235] VGAM20 is a novel bioinformatically detected regulatory, non protein coding, viral micro RNA (miRNA) gene. The method by which VGAM20 was detected is described hereinabove with reference to FIGS. 2-8.

[0236] VGAM20 gene, herein designated VGAM GENE, is a viral gene contained in the genome of Vaccinia virus. VGAM20 host target gene, herein designated VGAM HOST TARGET GENE, is a human gene contained in the human genome.

[0237] VGAM20 gene, herein designated VGAM GENE, encodes a VGAM20 precursor RNA, herein designated VGAM PRECURSOR RNA. Similar to other miRNA genes, and unlike most ordinary genes, VGAM20 precursor RNA, herein designated VGAM PRECURSOR RNA, does not encode a protein. A nucleotide sequence identical or highly similar to the nucleotide sequence of VGAM20 precursor RNA is designated SEQ ID:6, and is provided hereinbelow with reference to the sequence listing part. Nucleotide sequence SEQ ID:6 is located at position 188927 relative to the genome of Vaccinia virus.

[0238] VGAM20 precursor RNA, herein designated VGAM PRECURSOR RNA, folds onto itself, forming VGAM20 folded precursor RNA, herein designated VGAM FOLDED PRECURSOR RNA, which has a two-dimensional hairpin structure. As is well known in the art, this hairpin structure, is typical of RNA encoded by miRNA genes, and is due to the fact that the nucleotide sequence of the first half of the RNA encoded by a miRNA gene is an accurate or partial inversed-reversed sequence of the nucleotide sequence of the second half thereof.

[0239] An enzyme complex designated DICER COMPLEX, dices the VGAM20 folded precursor RNA, herein designated VGAM FOLDED PRECURSOR RNA, into VGAM20 RNA, herein designated VGAM RNA, a single stranded ˜22 nt long RNA segment. As is known in the art, dicing of a hairpin structured RNA precursor product into a short ˜22 nt RNA segment is catalyzed by an enzyme complex comprising an enzyme called Dicer together with other necessary proteins. A probable (over 84%) nucleotide sequence of VGAM20 RNA is designated SEQ ID:355, and is provided hereinbelow with reference to the sequence listing part.

[0240] VGAM20 host target gene, herein designated VGAM HOST TARGET GENE, encodes a corresponding messenger RNA, VGAM20 host target RNA, herein designated VGAM HOST TARGET RNA. VGAM20 host target RNA, herein designated VGAM HOST TARGET RNA, comprises three regions, as is typical of mRNA of a protein coding gene: a 5 untranslated region, a protein coding region and a 3 untranslated region, designated 5UTR, PROTEIN CODING and 3UTR respectively.

[0241] VGAM20 RNA, herein designated VGAM RNA, binds complementarily to one or more host target binding sites located in untranslated regions of VGAM20 host target RNA, herein designated VGAM HOST TARGET RNA. This complementary binding is due to the fact that the nucleotide sequence of VGAM20 RNA, herein designated VGAM RNA, is an accurate or a partial inversed-reversed sequence of the nucleotide sequence of each of the host target binding sites. As an illustration, FIG. 1 shows 3 such host target binding sites, designated BINDING SITE I, BINDING SITE II and BINDING SITE III respectively. It is appreciated that the number of host target binding sites shown in FIG. 1 is meant as an illustration only, and is not meant to be limiting VGAM20 RNA, herein designated VGAM RNA, may have a different number of host target binding sites in untranslated regions of a VGAM20 host target RNA, herein designated VGAM HOST TARGET RNA. It is further appreciated that while FIG. 1 depicts host target binding sites in the 3UTR region, this is meant as an example only these host target binding sites may be located in the 3UTR region, the 5UTR region, or in both 3UTR and 5UTR regions.

[0242] The complementary binding of VGAM20 RNA, herein designated VGAM RNA, to host target binding sites on VGAM20 host target RNA, herein designated VGAM HOST TARGET RNA, such as BINDING SITE I, BINDING SITE II and BINDING SITE III, inhibits translation of VGAM20 host target RNA, herein designated VGAM HOST TARGET RNA, into VGAM20 host target protein, herein designated VGAM HOST TARGET PROTEIN. VGAM host target protein is therefore outlined by a broken line.

[0243] It is appreciated that VGAM20 host target gene, herein designated VGAM HOST TARGET GENE, in fact represents a plurality of VGAM20 host target genes. The mRNA of each one of this plurality of VGAM20 host target genes comprises one or more host target binding sites, each having a nucleotide sequence which is at least partly complementary to VGAM20 RNA, herein designated VGAM RNA, and which when bound by VGAM20 RNA, herein designated VGAM RNA, causes inhibition of translation of respective one or more VGAM20 host target proteins.

[0244] It is further appreciated by one skilled in the art that the mode of translational inhibition illustrated by FIG. 1 with specific reference to translational inhibition exerted by VGAM20 gene, herein designated VGAM GENE, on one or more VGAM20 host target gene, herein designated VGAM HOST TARGET GENE, is in fact common to other known non-viral miRNA genes. As mentioned hereinabove with reference to the background section, although a specific complementary binding site has been demonstrated only for some of the known miRNA genes (primarily Lin-4 and Let-7), all other recently discovered miRNA genes are also believed by those skilled in the art to modulate expression of other genes by complementary binding, although specific complementary binding sites of these other miRNA genes have not yet been found (Ruvkun G., Perspective: Glimpses of a tiny RNA world, Science 294, 779 (2001)).

[0245] It is yet further appreciated that a function of VGAM20 is inhibition of expression of host target genes, as part of a novel viral mechanism of attacking a host. Accordingly, utilities of VGAM20 include diagnosis, prevention and treatment of viral infection by Vaccinia virus. Specific functions, and accordingly utilities, of VGAM20 correlate with, and may be deduced from, the identity of the host target genes which VGAM20 binds and inhibits, and the function of these host target genes, as elaborated hereinbelow.

[0246] Nucleotide sequences of the VGAM20 precursor RNA, herein designated VGAM PRECURSOR RNA, and of the diced VGAM20 RNA, herein designated VGAM RNA, and a schematic representation of the secondary folding of VGAM20 folded precursor RNA, herein designated VGAM FOLDED PRECURSOR RNA, of VGAM20 are further described hereinbelow with reference to Table 1.

[0247] Nucleotide sequences of host target binding sites, such as BINDING SITE-I, BINDING SITE-II and BINDING SITE-III of FIG. 1, found on, and schematic representation of the complementarity of each of these host target binding sites to VGAM20 RNA, herein designated VGAM RNA, are described hereinbelow with reference to Table 2.

[0248] FIG. 1 further provides a conceptual description of another novel bioinformatically detected viral gene of the present invention, referred to here as Viral Genomic Address Messenger 21 (VGAM21) viral gene, which modulates expression of respective host target genes thereof, the function and utility of which host target genes is known in the art.

[0249] VGAM21 is a novel bioinformatically detected regulatory, non protein coding, viral micro RNA (miRNA) gene. The method by which VGAM21 was detected is described hereinabove with reference to FIGS. 2-8.

[0250] VGAM21 gene, herein designated VGAM GENE, is a viral gene contained in the genome of Vaccinia virus. VGAM21 host target gene, herein designated VGAM HOST TARGET GENE, is a human gene contained in the human genome.

[0251] VGAM21 gene, herein designated VGAM GENE, encodes a VGAM21 precursor RNA, herein designated VGAM PRECURSOR RNA. Similar to other miRNA genes, and unlike most ordinary genes, VGAM21 precursor RNA, herein designated VGAM PRECURSOR RNA, does not encode a protein. A nucleotide sequence identical or highly similar to the nucleotide sequence of VGAM21 precursor RNA is designated SEQ ID:7, and is provided hereinbelow with reference to the sequence listing part. Nucleotide sequence SEQ ID:7 is located at position 188927 relative to the genome of Vaccinia virus.

[0252] VGAM21 precursor RNA, herein designated VGAM PRECURSOR RNA, folds onto itself, forming VGAM21 folded precursor RNA, herein designated VGAM FOLDED PRECURSOR RNA, which has a two-dimensional hairpin structure. As is well known in the art, this hairpin structure, is typical of RNA encoded by miRNA genes, and is due to the fact that the nucleotide sequence of the first half of the RNA encoded by a miRNA gene is an accurate or partial inversed-reversed sequence of the nucleotide sequence of the second half thereof.

[0253] An enzyme complex designated DICER COMPLEX, dices the VGAM21 folded precursor RNA, herein designated VGAM FOLDED PRECURSOR RNA, into VGAM21 RNA, herein designated VGAM RNA, a single stranded ˜22 nt long RNA segment. As is known in the art, dicing of a hairpin structured RNA precursor product into a short ˜22 nt RNA segment is catalyzed by an enzyme complex comprising an enzyme called Dicer together with other necessary proteins. A probable (over 84%) nucleotide sequence of VGAM21 RNA is designated SEQ ID:356, and is provided hereinbelow with reference to the sequence listing part.

[0254] VGAM21 host target gene, herein designated VGAM HOST TARGET GENE, encodes a corresponding messenger RNA, VGAM21 host target RNA, herein designated VGAM HOST TARGET RNA. VGAM21 host target RNA, herein designated VGAM HOST TARGET RNA, comprises three regions, as is typical of mRNA of a protein coding gene: a 5 untranslated region, a protein coding region and a 3 untranslated region, designated 5UTR, PROTEIN CODING and 3UTR respectively.

[0255] VGAM21 RNA, herein designated VGAM RNA, binds complementarily to one or more host target binding sites located in untranslated regions of VGAM21 host target RNA, herein designated VGAM HOST TARGET RNA. This complementary binding is due to the fact that the nucleotide sequence of VGAM21 RNA, herein designated VGAM RNA, is an accurate or a partial inversed-reversed sequence of the nucleotide sequence of each of the host target binding sites. As an illustration, FIG. 1 shows 3 such host target binding sites, designated BINDING SITE I, BINDING SITE II and BINDING SITE III respectively. It is appreciated that the number of host target binding sites shown in FIG. 1 is meant as an illustration only, and is not meant to be limiting VGAM21 RNA, herein designated VGAM RNA, may have a different number of host target binding sites in untranslated regions of a VGAM21 host target RNA, herein designated VGAM HOST TARGET RNA. It is further appreciated that while FIG. 1 depicts host target binding sites in the 3UTR region, this is meant as an example only these host target binding sites may be located in the 3UTR region, the 5UTR region, or in both 3UTR and 5UTR regions.

[0256] The complementary binding of VGAM21 RNA, herein designated VGAM RNA, to host target binding sites on VGAM21 host target RNA, herein designated VGAM HOST TARGET RNA, such as BINDING SITE I, BINDING SITE II and BINDING SITE III, inhibits translation of VGAM21 host target RNA, herein designated VGAM HOST TARGET RNA, into VGAM21 host target protein, herein designated VGAM HOST TARGET PROTEIN. VGAM host target protein is therefore outlined by a broken line.

[0257] It is appreciated that VGAM21 host target gene, herein designated VGAM HOST TARGET GENE, in fact represents a plurality of VGAM21 host target genes. The mRNA of each one of this plurality of VGAM21 host target genes comprises one or more host target binding sites, each having a nucleotide sequence which is at least partly complementary to VGAM21 RNA, herein designated VGAM RNA, and which when bound by VGAM21 RNA, herein designated VGAM RNA, causes inhibition of translation of respective one or more VGAM21 host target proteins.

[0258] It is further appreciated by one skilled in the art that the mode of translational inhibition illustrated by FIG. 1 with specific reference to translational inhibition exerted by VGAM21 gene, herein designated VGAM GENE, on one or more VGAM21 host target gene, herein designated VGAM HOST TARGET GENE, is in fact common to other known non-viral miRNA genes. As mentioned hereinabove with reference to the background section, although a specific complementary binding site has been demonstrated only for some of the known miRNA genes (primarily Lin-4 and Let-7), all other recently discovered miRNA genes are also believed by those skilled in the art to modulate expression of other genes by complementary binding, although specific complementary binding sites of these other miRNA genes have not yet been found (Ruvkun G., Perspective: Glimpses of a tiny RNA world, Science 294, 779 (2001)).

[0259] It is yet further appreciated that a function of VGAM21 is inhibition of expression of host target genes, as part of a novel viral mechanism of attacking a host. Accordingly, utilities of VGAM21 include diagnosis, prevention and treatment of viral infection by Vaccinia virus. Specific functions, and accordingly utilities, of VGAM21 correlate with, and may be deduced from, the identity of the host target genes which VGAM21 binds and inhibits, and the function of these host target genes, as elaborated hereinbelow.

[0260] Nucleotide sequences of the VGAM21 precursor RNA, herein designated VGAM PRECURSOR RNA, and of the diced VGAM21 RNA, herein designated VGAM RNA, and a schematic representation of the secondary folding of VGAM21 folded precursor RNA, herein designated VGAM FOLDED PRECURSOR RNA, of VGAM21 are further described hereinbelow with reference to Table 1.

[0261] Nucleotide sequences of host target binding sites, such as BINDING SITE-I, BINDING SITE-II and BINDING SITE-III of FIG. 1, found on, and schematic representation of the complementarity of each of these host target binding sites to VGAM21 RNA, herein designated VGAM RNA, are described hereinbelow with reference to Table 2.

[0262] FIG. 1 further provides a conceptual description of another novel bioinformatically detected viral gene of the present invention, referred to here as Viral Genomic Address Messenger 22 (VGAM22) viral gene, which modulates expression of respective host target genes thereof, the function and utility of which host target genes is known in the art.

[0263] VGAM22 is a novel bioinformatically detected regulatory, non protein coding, viral micro RNA (miRNA) gene. The method by which VGAM22 was detected is described hereinabove with reference to FIGS. 2-8.

[0264] VGAM22 gene, herein designated VGAM GENE, is a viral gene contained in the genome of Vaccinia virus. VGAM22 host target gene, herein designated VGAM HOST TARGET GENE, is a human gene contained in the human genome.

[0265] VGAM22 gene, herein designated VGAM GENE, encodes a VGAM22 precursor RNA, herein designated VGAM PRECURSOR RNA. Similar to other miRNA genes, and unlike most ordinary genes, VGAM22 precursor RNA, herein designated VGAM PRECURSOR RNA, does not encode a protein. A nucleotide sequence identical or highly similar to the nucleotide sequence of VGAM22 precursor RNA is designated SEQ ID:8, and is provided hereinbelow with reference to the sequence listing part. Nucleotide sequence SEQ ID:8 is located at position 188927 relative to the genome of Vaccinia virus.

[0266] VGAM22 precursor RNA, herein designated VGAM PRECURSOR RNA, folds onto itself, forming VGAM22 folded precursor RNA, herein designated VGAM FOLDED PRECURSOR RNA, which has a two-dimensional hairpin structure. As is well known in the art, this hairpin structure, is typical of RNA encoded by miRNA genes, and is due to the fact that the nucleotide sequence of the first half of the RNA encoded by a miRNA gene is an accurate or partial inversed-reversed sequence of the nucleotide sequence of the second half thereof.

[0267] An enzyme complex designated DICER COMPLEX, dices the VGAM22 folded precursor RNA, herein designated VGAM FOLDED PRECURSOR RNA, into VGAM22 RNA, herein designated VGAM RNA, a single stranded ˜22 nt long RNA segment. As is known in the art, dicing of a hairpin structured RNA precursor product into a short ˜22 nt RNA segment is catalyzed by an enzyme complex comprising an enzyme called Dicer together with other necessary proteins. A probable (over 84%) nucleotide sequence of VGAM22 RNA is designated SEQ ID:357, and is provided hereinbelow with reference to the sequence listing part.

[0268] VGAM22 host target gene, herein designated VGAM HOST TARGET GENE, encodes a corresponding messenger RNA, VGAM22 host target RNA, herein designated VGAM HOST TARGET RNA. VGAM22 host target RNA, herein designated VGAM HOST TARGET RNA, comprises three regions, as is typical of mRNA of a protein coding gene: a 5 untranslated region, a protein coding region and a 3 untranslated region, designated 5UTR, PROTEIN CODING and 3UTR respectively.

[0269] VGAM22 RNA, herein designated VGAM RNA, binds complementarily to one or more host target binding sites located in untranslated regions of VGAM22 host target RNA, herein designated VGAM HOST TARGET RNA. This complementary binding is due to the fact that the nucleotide sequence of VGAM22 RNA, herein designated VGAM RNA, is an accurate or a partial inversed-reversed sequence of the nucleotide sequence of each of the host target binding sites. As an illustration, FIG. 1 shows 3 such host target binding sites, designated BINDING SITE I, BINDING SITE II and BINDING SITE III respectively. It is appreciated that the number of host target binding sites shown in FIG. 1 is meant as an illustration only, and is not meant to be limiting VGAM22 RNA, herein designated VGAM RNA, may have a different number of host target binding sites in untranslated regions of a VGAM22 host target RNA, herein designated VGAM HOST TARGET RNA. It is further appreciated that while FIG. 1 depicts host target binding sites in the 3UTR region, this is meant as an example only these host target binding sites may be located in the 3UTR region, the 5UTR region, or in both 3UTR and 5UTR regions.

[0270] The complementary binding of VGAM22 RNA, herein designated VGAM RNA, to host target binding sites on VGAM22 host target RNA, herein designated VGAM HOST TARGET RNA, such as BINDING SITE I, BINDING SITE II and BINDING SITE III, inhibits translation of VGAM22 host target RNA, herein designated VGAM HOST TARGET RNA, into VGAM22 host target protein, herein designated VGAM HOST TARGET PROTEIN. VGAM host target protein is therefore outlined by a broken line.

[0271] It is appreciated that VGAM22 host target gene, herein designated VGAM HOST TARGET GENE, in fact represents a plurality of VGAM22 host target genes. The mRNA of each one of this plurality of VGAM22 host target genes comprises one or more host target binding sites, each having a nucleotide sequence which is at least partly complementary to VGAM22 RNA, herein designated VGAM RNA, and which when bound by VGAM22 RNA, herein designated VGAM RNA, causes inhibition of translation of respective one or more VGAM22 host target proteins.

[0272] It is further appreciated by one skilled in the art that the mode of translational inhibition illustrated by FIG. 1 with specific reference to translational inhibition exerted by VGAM22 gene, herein designated VGAM GENE, on one or more VGAM22 host target gene, herein designated VGAM HOST TARGET GENE, is in fact common to other known non-viral miRNA genes. As mentioned hereinabove with reference to the background section, although a specific complementary binding site has been demonstrated only for some of the known miRNA genes (primarily Lin-4 and Let-7), all other recently discovered miRNA genes are also believed by those skilled in the art to modulate expression of other genes by complementary binding, although specific complementary binding sites of these other miRNA genes have not yet been found (Ruvkun G., Perspective: Glimpses of a tiny RNA world, Science 294, 779 (2001)).

[0273] It is yet further appreciated that a function of VGAM22 is inhibition of expression of host target genes, as part of a novel viral mechanism of attacking a host. Accordingly, utilities of VGAM22 include diagnosis, prevention and treatment of viral infection by Vaccinia virus. Specific functions, and accordingly utilities, of VGAM22 correlate with, and may be deduced from, the identity of the host target genes which VGAM22 binds and inhibits, and the function of these host target genes, as elaborated hereinbelow.

[0274] Nucleotide sequences of the VGAM22 precursor RNA, herein designated VGAM PRECURSOR RNA, and of the diced VGAM22 RNA, herein designated VGAM RNA, and a schematic representation of the secondary folding of VGAM22 folded precursor RNA, herein designated VGAM FOLDED PRECURSOR RNA, of VGAM22 are further described hereinbelow with reference to Table 1.

[0275] Nucleotide sequences of host target binding sites, such as BINDING SITE-I, BINDING SITE-II and BINDING SITE-III of FIG. 1, found on, and schematic representation of the complementarity of each of these host target binding sites to VGAM22 RNA, herein designated VGAM RNA, are described hereinbelow with reference to Table 2.

[0276] FIG. 1 further provides a conceptual description of another novel bioinformatically detected viral gene of the present invention, referred to here as Viral Genomic Address Messenger 23 (VGAM23) viral gene, which modulates expression of respective host target genes thereof, the function and utility of which host target genes is known in the art.

[0277] VGAM23 is a novel bioinformatically detected regulatory, non protein coding, viral micro RNA (miRNA) gene. The method by which VGAM23 was detected is described hereinabove with reference to FIGS. 2-8.

[0278] VGAM23 gene, herein designated VGAM GENE, is a viral gene contained in the genome of Vaccinia virus. VGAM23 host target gene, herein designated VGAM HOST TARGET GENE, is a human gene contained in the human genome.

[0279] VGAM23 gene, herein designated VGAM GENE, encodes a VGAM23 precursor RNA, herein designated VGAM PRECURSOR RNA. Similar to other miRNA genes, and unlike most ordinary genes, VGAM23 precursor RNA, herein designated VGAM PRECURSOR RNA, does not encode a protein. A nucleotide sequence identical or highly similar to the nucleotide sequence of VGAM23 precursor RNA is designated SEQ ID:9, and is provided hereinbelow with reference to the sequence listing part. Nucleotide sequence SEQ ID:9 is located at position 188927 relative to the genome of Vaccinia virus.

[0280] VGAM23 precursor RNA, herein designated VGAM PRECURSOR RNA, folds onto itself, forming VGAM23 folded precursor RNA, herein designated VGAM FOLDED PRECURSOR RNA, which has a two-dimensional hairpin structure. As is well known in the art, this hairpin structure, is typical of RNA encoded by miRNA genes, and is due to the fact that the nucleotide sequence of the first half of the RNA encoded by a miRNA gene is an accurate or partial inversed-reversed sequence of the nucleotide sequence of the second half thereof.

[0281] An enzyme complex designated DICER COMPLEX, dices the VGAM23 folded precursor RNA, herein designated VGAM FOLDED PRECURSOR RNA, into VGAM23 RNA, herein designated VGAM RNA, a single stranded ˜22 nt long RNA segment. As is known in the art, dicing of a hairpin structured RNA precursor product into a short ˜22 nt RNA segment is catalyzed by an enzyme complex comprising an enzyme called Dicer together with other necessary proteins. A probable (over 84%) nucleotide sequence of VGAM23 RNA is designated SEQ ID:358, and is provided hereinbelow with reference to the sequence listing part.

[0282] VGAM23 host target gene, herein designated VGAM HOST TARGET GENE, encodes a corresponding messenger RNA, VGAM23 host target RNA, herein designated VGAM HOST TARGET RNA. VGAM23 host target RNA, herein designated VGAM HOST TARGET RNA, comprises three regions, as is typical of mRNA of a protein coding gene: a 5 untranslated region, a protein coding region and a 3 untranslated region, designated 5UTR, PROTEIN CODING and 3UTR respectively.

[0283] VGAM23 RNA, herein designated VGAM RNA, binds complementarily to one or more host target binding sites located in untranslated regions of VGAM23 host target RNA, herein designated VGAM HOST TARGET RNA. This complementary binding is due to the fact that the nucleotide sequence of VGAM23 RNA, herein designated VGAM RNA, is an accurate or a partial inversed-reversed sequence of the nucleotide sequence of each of the host target binding sites. As an illustration, FIG. 1 shows 3 such host target binding sites, designated BINDING SITE I, BINDING SITE II and BINDING SITE III respectively. It is appreciated that the number of host target binding sites shown in FIG. 1 is meant as an illustration only, and is not meant to be limiting VGAM23 RNA, herein designated VGAM RNA, may have a different number of host target binding sites in untranslated regions of a VGAM23 host target RNA, herein designated VGAM HOST TARGET RNA. It is further appreciated that while FIG. 1 depicts host target binding sites in the 3UTR region, this is meant as an example only these host target binding sites may be located in the 3UTR region, the 5UTR region, or in both 3UTR and 5UTR regions.

[0284] The complementary binding of VGAM23 RNA, herein designated VGAM RNA, to host target binding sites on VGAM23 host target RNA, herein designated VGAM HOST TARGET RNA, such as BINDING SITE I, BINDING SITE II and BINDING SITE III, inhibits translation of VGAM23 host target RNA, herein designated VGAM HOST TARGET RNA, into VGAM23 host target protein, herein designated VGAM HOST TARGET PROTEIN. VGAM host target protein is therefore outlined by a broken line.

[0285] It is appreciated that VGAM23 host target gene, herein designated VGAM HOST TARGET GENE, in fact represents a plurality of VGAM23 host target genes. The mRNA of each one of this plurality of VGAM23 host target genes comprises one or more host target binding sites, each having a nucleotide sequence which is at least partly complementary to VGAM23 RNA, herein designated VGAM RNA, and which when bound by VGAM23 RNA, herein designated VGAM RNA, causes inhibition of translation of respective one or more VGAM23 host target proteins.

[0286] It is further appreciated by one skilled in the art that the mode of translational inhibition illustrated by FIG. 1 with specific reference to translational inhibition exerted by VGAM23 gene, herein designated VGAM GENE, on one or more VGAM23 host target gene, herein designated VGAM HOST TARGET GENE, is in fact common to other known non-viral miRNA genes. As mentioned hereinabove with reference to the background section, although a specific complementary binding site has been demonstrated only for some of the known miRNA genes (primarily Lin-4 and Let-7), all other recently discovered miRNA genes are also believed by those skilled in the art to modulate expression of other genes by complementary binding, although specific complementary binding sites of these other miRNA genes have not yet been found (Ruvkun G., Perspective: Glimpses of a tiny RNA world, Science 294, 779 (2001)).

[0287] It is yet further appreciated that a function of VGAM23 is inhibition of expression of host target genes, as part of a novel viral mechanism of attacking a host. Accordingly, utilities of VGAM23 include diagnosis, prevention and treatment of viral infection by Vaccinia virus. Specific functions, and accordingly utilities, of VGAM23 correlate with, and may be deduced from, the identity of the host target genes which VGAM23 binds and inhibits, and the function of these host target genes, as elaborated hereinbelow.

[0288] Nucleotide sequences of the VGAM23 precursor RNA, herein designated VGAM PRECURSOR RNA, and of the diced VGAM23 RNA, herein designated VGAM RNA, and a schematic representation of the secondary folding of VGAM23 folded precursor RNA, herein designated VGAM FOLDED PRECURSOR RNA, of VGAM23 are further described hereinbelow with reference to Table 1.

[0289] Nucleotide sequences of host target binding sites, such as BINDING SITE-I, BINDING SITE-II and BINDING SITE-III of FIG. 1, found on, and schematic representation of the complementarity of each of these host target binding sites to VGAM23 RNA, herein designated VGAM RNA, are described hereinbelow with reference to Table 2.

[0290] FIG. 1 further provides a conceptual description of another novel bioinformatically detected viral gene of the present invention, referred to here as Viral Genomic Address Messenger 24 (VGAM24) viral gene, which modulates expression of respective host target genes thereof, the function and utility of which host target genes is known in the art.

[0291] VGAM24 is a novel bioinformatically detected regulatory, non protein coding, viral micro RNA (miRNA) gene. The method by which VGAM24 was detected is described hereinabove with reference to FIGS. 2-8.

[0292] VGAM24 gene, herein designated VGAM GENE, is a viral gene contained in the genome of Vaccinia virus. VGAM24 host target gene, herein designated VGAM HOST TARGET GENE, is a human gene contained in the human genome.

[0293] VGAM24 gene, herein designated VGAM GENE, encodes a VGAM24 precursor RNA, herein designated VGAM PRECURSOR RNA. Similar to other miRNA genes, and unlike most ordinary genes, VGAM24 precursor RNA, herein designated VGAM PRECURSOR RNA, does not encode a protein. A nucleotide sequence identical or highly similar to the nucleotide sequence of VGAM24 precursor RNA is designated SEQ ID:10, and is provided hereinbelow with reference to the sequence listing part. Nucleotide sequence SEQ ID: 10 is located at position 188927 relative to the genome of Vaccinia virus.

[0294] VGAM24 precursor RNA, herein designated VGAM PRECURSOR RNA, folds onto itself, forming VGAM24 folded precursor RNA, herein designated VGAM FOLDED PRECURSOR RNA, which has a two-dimensional hairpin structure. As is well known in the art, this hairpin structure, is typical of RNA encoded by miRNA genes, and is due to the fact that the nucleotide sequence of the first half of the RNA encoded by a miRNA gene is an accurate or partial inversed-reversed sequence of the nucleotide sequence of the second half thereof.

[0295] An enzyme complex designated DICER COMPLEX, dices the VGAM24 folded precursor RNA, herein designated VGAM FOLDED PRECURSOR RNA, into VGAM24 RNA, herein designated VGAM RNA, a single stranded ˜22 nt long RNA segment. As is known in the art, dicing of a hairpin structured RNA precursor product into a short ˜22 nt RNA segment is catalyzed by an enzyme complex comprising an enzyme called Dicer together with other necessary proteins. A probable (over 84%) nucleotide sequence of VGAM24 RNA is designated SEQ ID:359, and is provided hereinbelow with reference to the sequence listing part.

[0296] VGAM24 host target gene, herein designated VGAM HOST TARGET GENE, encodes a corresponding messenger RNA, VGAM24 host target RNA, herein designated VGAM HOST TARGET RNA. VGAM24 host target RNA, herein designated VGAM HOST TARGET RNA, comprises three regions, as is typical of mRNA of a protein coding gene: a 5 untranslated region, a protein coding region and a 3 untranslated region, designated 5UTR, PROTEIN CODING and 3UTR respectively.

[0297] VGAM24 RNA, herein designated VGAM RNA, binds complementarily to one or more host target binding sites located in untranslated regions of VGAM24 host target RNA, herein designated VGAM HOST TARGET RNA. This complementary binding is due to the fact that the nucleotide sequence of VGAM24 RNA, herein designated VGAM RNA, is an accurate or a partial inversed-reversed sequence of the nucleotide sequence of each of the host target binding sites. As an illustration, FIG. 1 shows 3 such host target binding sites, designated BINDING SITE I, BINDING SITE II and BINDING SITE III respectively. It is appreciated that the number of host target binding sites shown in FIG. 1 is meant as an illustration only, and is not meant to be limiting VGAM24 RNA, herein designated VGAM RNA, may have a different number of host target binding sites in untranslated regions of a VGAM24 host target RNA, herein designated VGAM HOST TARGET RNA. It is further appreciated that while FIG. 1 depicts host target binding sites in the 3UTR region, this is meant as an example only these host target binding sites may be located in the 3UTR region, the 5UTR region, or in both 3UTR and 5UTR regions.

[0298] The complementary binding of VGAM24 RNA, herein designated VGAM RNA, to host target binding sites on VGAM24 host target RNA, herein designated VGAM HOST TARGET RNA, such as BINDING SITE I, BINDING SITE II and BINDING SITE III, inhibits translation of VGAM24 host target RNA, herein designated VGAM HOST TARGET RNA, into VGAM24 host target protein, herein designated VGAM HOST TARGET PROTEIN. VGAM host target protein is therefore outlined by a broken line.

[0299] It is appreciated that VGAM24 host target gene, herein designated VGAM HOST TARGET GENE, in fact represents a plurality of VGAM24 host target genes. The mRNA of each one of this plurality of VGAM24 host target genes comprises one or more host target binding sites, each having a nucleotide sequence which is at least partly complementary to VGAM24 RNA, herein designated VGAM RNA, and which when bound by VGAM24 RNA, herein designated VGAM RNA, causes inhibition of translation of respective one or more VGAM24 host target proteins.

[0300] It is further appreciated by one skilled in the art that the mode of translational inhibition illustrated by FIG. 1 with specific reference to translational inhibition exerted by VGAM24 gene, herein designated VGAM GENE, on one or more VGAM24 host target gene, herein designated VGAM HOST TARGET GENE, is in fact common to other known non-viral miRNA genes. As mentioned hereinabove with reference to the background section, although a specific complementary binding site has been demonstrated only for some of the known miRNA genes (primarily Lin-4 and Let-7), all other recently discovered miRNA genes are also believed by those skilled in the art to modulate expression of other genes by complementary binding, although specific complementary binding sites of these other miRNA genes have not yet been found (Ruvkun G., Perspective: Glimpses of a tiny RNA world, Science 294, 779 (2001)).

[0301] It is yet further appreciated that a function of VGAM24 is inhibition of expression of host target genes, as part of a novel viral mechanism of attacking a host. Accordingly, utilities of VGAM24 include diagnosis, prevention and treatment of viral infection by Vaccinia virus. Specific functions, and accordingly utilities, of VGAM24 correlate with, and may be deduced from, the identity of the host target genes which VGAM24 binds and inhibits, and the function of these host target genes, as elaborated hereinbelow.

[0302] Nucleotide sequences of the VGAM24 precursor RNA, herein designated VGAM PRECURSOR RNA, and of the diced VGAM24 RNA, herein designated VGAM RNA, and a schematic representation of the secondary folding of VGAM24 folded precursor RNA, herein designated VGAM FOLDED PRECURSOR RNA, of VGAM24 are further described hereinbelow with reference to Table 1.

[0303] Nucleotide sequences of host target binding sites, such as BINDING SITE-I, BINDING SITE-II and BINDING SITE-III of FIG. 1, found on, and schematic representation of the complementarity of each of these host target binding sites to VGAM24 RNA, herein designated VGAM RNA, are described hereinbelow with reference to Table 2.

[0304] FIG. 1 further provides a conceptual description of another novel bioinformatically detected viral gene of the present invention, referred to here as Viral Genomic Address Messenger 25 (VGAM25) viral gene, which modulates expression of respective host target genes thereof, the function and utility of which host target genes is known in the art.

[0305] VGAM25 is a novel bioinformatically detected regulatory, non protein coding, viral micro RNA (miRNA) gene. The method by which VGAM25 was detected is described hereinabove with reference to FIGS. 2-8.

[0306] VGAM25 gene, herein designated VGAM GENE, is a viral gene contained in the genome of Vaccinia virus. VGAM25 host target gene, herein designated VGAM HOST TARGET GENE, is a human gene contained in the human genome.

[0307] VGAM25 gene, herein designated VGAM GENE, encodes a VGAM25 precursor RNA, herein designated VGAM PRECURSOR RNA. Similar to other miRNA genes, and unlike most ordinary genes, VGAM25 precursor RNA, herein designated VGAM PRECURSOR RNA, does not encode a protein. A nucleotide sequence identical or highly similar to the nucleotide sequence of VGAM25 precursor RNA is designated SEQ ID:11, and is provided hereinbelow with reference to the sequence listing part. Nucleotide sequence SEQ ID:11 is located at position 188927 relative to the genome of Vaccinia virus.

[0308] VGAM25 precursor RNA, herein designated VGAM PRECURSOR RNA, folds onto itself, forming VGAM25 folded precursor RNA, herein designated VGAM FOLDED PRECURSOR RNA, which has a two-dimensional hairpin structure. As is well known in the art, this hairpin structure, is typical of RNA encoded by miRNA genes, and is due to the fact that the nucleotide sequence of the first half of the RNA encoded by a miRNA gene is an accurate or partial inversed-reversed sequence of the nucleotide sequence of the second half thereof.

[0309] An enzyme complex designated DICER COMPLEX, dices the VGAM25 folded precursor RNA, herein designated VGAM FOLDED PRECURSOR RNA, into VGAM25 RNA, herein designated VGAM RNA, a single stranded ˜22 nt long RNA segment. As is known in the art, dicing of a hairpin structured RNA precursor product into a short ˜22 nt RNA segment is catalyzed by an enzyme complex comprising an enzyme called Dicer together with other necessary proteins. A probable (over 84%) nucleotide sequence of VGAM25 RNA is designated SEQ ID:360, and is provided hereinbelow with reference to the sequence listing part.

[0310] VGAM25 host target gene, herein designated VGAM HOST TARGET GENE, encodes a corresponding messenger RNA, VGAM25 host target RNA, herein designated VGAM HOST TARGET RNA. VGAM25 host target RNA, herein designated VGAM HOST TARGET RNA, comprises three regions, as is typical of mRNA of a protein coding gene: a 5 untranslated region, a protein coding region and a 3 untranslated region, designated 5UTR, PROTEIN CODING and 3UTR respectively.

[0311] VGAM25 RNA, herein designated VGAM RNA, binds complementarily to one or more host target binding sites located in untranslated regions of VGAM25 host target RNA, herein designated VGAM HOST TARGET RNA. This complementary binding is due to the fact that the nucleotide sequence of VGAM25 RNA, herein designated VGAM RNA, is an accurate or a partial inversed-reversed sequence of the nucleotide sequence of each of the host target binding sites. As an illustration, FIG. 1 shows 3 such host target binding sites, designated BINDING SITE I, BINDING SITE II and BINDING SITE III respectively. It is appreciated that the number of host target binding sites shown in FIG. 1 is meant as an illustration only, and is not meant to be limiting VGAM25 RNA, herein designated VGAM RNA, may have a different number of host target binding sites in untranslated regions of a VGAM25 host target RNA, herein designated VGAM HOST TARGET RNA. It is further appreciated that while FIG. 1 depicts host target binding sites in the 3UTR region, this is meant as an example only these host target binding sites may be located in the 3UTR region, the 5UTR region, or in both 3UTR and 5UTR regions.

[0312] The complementary binding of VGAM25 RNA, herein designated VGAM RNA, to host target binding sites on VGAM25 host target RNA, herein designated VGAM HOST TARGET RNA, such as BINDING SITE I, BINDING SITE II and BINDING SITE III, inhibits translation of VGAM25 host target RNA, herein designated VGAM HOST TARGET RNA, into VGAM25 host target protein, herein designated VGAM HOST TARGET PROTEIN. VGAM host target protein is therefore outlined by a broken line.

[0313] It is appreciated that VGAM25 host target gene, herein designated VGAM HOST TARGET GENE, in fact represents a plurality of VGAM25 host target genes. The mRNA of each one of this plurality of VGAM25 host target genes comprises one or more host target binding sites, each having a nucleotide sequence which is at least partly complementary to VGAM25 RNA, herein designated VGAM RNA, and which when bound by VGAM25 RNA, herein designated VGAM RNA, causes inhibition of translation of respective one or more VGAM25 host target proteins.

[0314] It is further appreciated by one skilled in the art that the mode of translational inhibition illustrated by FIG. 1 with specific reference to translational inhibition exerted by VGAM25 gene, herein designated VGAM GENE, on one or more VGAM25 host target gene, herein designated VGAM HOST TARGET GENE, is in fact common to other known non-viral miRNA genes. As mentioned hereinabove with reference to the background section, although a specific complementary binding site has been demonstrated only for some of the known miRNA genes (primarily Lin-4 and Let-7), all other recently discovered miRNA genes are also believed by those skilled in the art to modulate expression of other genes by complementary binding, although specific complementary binding sites of these other miRNA genes have not yet been found (Ruvkun G., Perspective: Glimpses of a tiny RNA world, Science 294, 779 (2001)).

[0315] It is yet further appreciated that a function of VGAM25 is inhibition of expression of host target genes, as part of a novel viral mechanism of attacking a host. Accordingly, utilities of VGAM25 include diagnosis, prevention and treatment of viral infection by Vaccinia virus. Specific functions, and accordingly utilities, of VGAM25 correlate with, and may be deduced from, the identity of the host target genes which VGAM25 binds and inhibits, and the function of these host target genes, as elaborated hereinbelow.

[0316] Nucleotide sequences of the VGAM25 precursor RNA, herein designated VGAM PRECURSOR RNA, and of the diced VGAM25 RNA, herein designated VGAM RNA, and a schematic representation of the secondary folding of VGAM25 folded precursor RNA, herein designated VGAM FOLDED PRECURSOR RNA, of VGAM25 are further described hereinbelow with reference to Table 1.

[0317] Nucleotide sequences of host target binding sites, such as BINDING SITE-I, BINDING SITE-II and BINDING SITE-III of FIG. 1, found on, and schematic representation of the complementarity of each of these host target binding sites to VGAM25 RNA, herein designated VGAM RNA, are described hereinbelow with reference to Table 2.

[0318] FIG. 1 further provides a conceptual description of another novel bioinformatically detected viral gene of the present invention, referred to here as Viral Genomic Address Messenger 26 (VGAM26) viral gene, which modulates expression of respective host target genes thereof, the function and utility of which host target genes is known in the art.

[0319] VGAM26 is a novel bioinformatically detected regulatory, non protein coding, viral micro RNA (miRNA) gene. The method by which VGAM26 was detected is described hereinabove with reference to FIGS. 2-8.

[0320] VGAM26 gene, herein designated VGAM GENE, is a viral gene contained in the genome of Vaccinia virus. VGAM26 host target gene, herein designated VGAM HOST TARGET GENE, is a human gene contained in the human genome.

[0321] VGAM26 gene, herein designated VGAM GENE, encodes a VGAM26 precursor RNA, herein designated VGAM PRECURSOR RNA. Similar to other miRNA genes, and unlike most ordinary genes, VGAM26 precursor RNA, herein designated VGAM PRECURSOR RNA, does not encode a protein. A nucleotide sequence identical or highly similar to the nucleotide sequence of VGAM26 precursor RNA is designated SEQ ID:12, and is provided hereinbelow with reference to the sequence listing part. Nucleotide sequence SEQ ID:12 is located at position 189067 relative to the genome of Vaccinia virus.

[0322] VGAM26 precursor RNA, herein designated VGAM PRECURSOR RNA, folds onto itself, forming VGAM26 folded precursor RNA, herein designated VGAM FOLDED PRECURSOR RNA, which has a two-dimensional hairpin structure. As is well known in the art, this hairpin structure, is typical of RNA encoded by miRNA genes, and is due to the fact that the nucleotide sequence of the first half of the RNA encoded by a miRNA gene is an accurate or partial inversed-reversed sequence of the nucleotide sequence of the second half thereof.

[0323] An enzyme complex designated DICER COMPLEX, dices the VGAM26 folded precursor RNA, herein designated VGAM FOLDED PRECURSOR RNA, into VGAM26 RNA, herein designated VGAM RNA, a single stranded ˜22 nt long RNA segment. As is known in the art, dicing of a hairpin structured RNA precursor product into a short ˜22 nt RNA segment is catalyzed by an enzyme complex comprising an enzyme called Dicer together with other necessary proteins. A probable (over 78%) nucleotide sequence of VGAM26 RNA is designated SEQ ID:361, and is provided hereinbelow with reference to the sequence listing part.

[0324] VGAM26 host target gene, herein designated VGAM HOST TARGET GENE, encodes a corresponding messenger RNA, VGAM26 host target RNA, herein designated VGAM HOST TARGET RNA. VGAM26 host target RNA, herein designated VGAM HOST TARGET RNA, comprises three regions, as is typical of mRNA of a protein coding gene: a 5 untranslated region, a protein coding region and a 3 untranslated region, designated 5UTR, PROTEIN CODING and 3UTR respectively.

[0325] VGAM26 RNA, herein designated VGAM RNA, binds complementarily to one or more host target binding sites located in untranslated regions of VGAM26 host target RNA, herein designated VGAM HOST TARGET RNA. This complementary binding is due to the fact that the nucleotide sequence of VGAM26 RNA, herein designated VGAM RNA, is an accurate or a partial inversed-reversed sequence of the nucleotide sequence of each of the host target binding sites. As an illustration, FIG. 1 shows 3 such host target binding sites, designated BINDING SITE I, BINDING SITE II and BINDING SITE III respectively. It is appreciated that the number of host target binding sites shown in FIG. 1 is meant as an illustration only, and is not meant to be limiting VGAM26 RNA, herein designated VGAM RNA, may have a different number of host target binding sites in untranslated regions of a VGAM26 host target RNA, herein designated VGAM HOST TARGET RNA. It is further appreciated that while FIG. 1 depicts host target binding sites in the 3UTR region, this is meant as an example only these host target binding sites may be located in the 3UTR region, the 5UTR region, or in both 3UTR and 5UTR regions.

[0326] The complementary binding of VGAM26 RNA, herein designated VGAM RNA, to host target binding sites on VGAM26 host target RNA, herein designated VGAM HOST TARGET RNA, such as BINDING SITE I, BINDING SITE II and BINDING SITE III, inhibits translation of VGAM26 host target RNA, herein designated VGAM HOST TARGET RNA, into VGAM26 host target protein, herein designated VGAM HOST TARGET PROTEIN. VGAM host target protein is therefore outlined by a broken line.

[0327] It is appreciated that VGAM26 host target gene, herein designated VGAM HOST TARGET GENE, in fact represents a plurality of VGAM26 host target genes. The mRNA of each one of this plurality of VGAM26 host target genes comprises one or more host target binding sites, each having a nucleotide sequence which is at least partly complementary to VGAM26 RNA, herein designated VGAM RNA, and which when bound by VGAM26 RNA, herein designated VGAM RNA, causes inhibition of translation of respective one or more VGAM26 host target proteins.

[0328] It is further appreciated by one skilled in the art that the mode of translational inhibition illustrated by FIG. 1 with specific reference to translational inhibition exerted by VGAM26 gene, herein designated VGAM GENE, on one or more VGAM26 host target gene, herein designated VGAM HOST TARGET GENE, is in fact common to other known non-viral miRNA genes. As mentioned hereinabove with reference to the background section, although a specific complementary binding site has been demonstrated only for some of the known miRNA genes (primarily Lin-4 and Let-7), all other recently discovered miRNA genes are also believed by those skilled in the art to modulate expression of other genes by complementary binding, although specific complementary binding sites of these other miRNA genes have not yet been found (Ruvkun G., Perspective: Glimpses of a tiny RNA world, Science 294, 779 (2001)).

[0329] It is yet further appreciated that a function of VGAM26 is inhibition of expression of host target genes, as part of a novel viral mechanism of attacking a host. Accordingly, utilities of VGAM26 include diagnosis, prevention and treatment of viral infection by Vaccinia virus. Specific functions, and accordingly utilities, of VGAM26 correlate with, and may be deduced from, the identity of the host target genes which VGAM26 binds and inhibits, and the function of these host target genes, as elaborated hereinbelow.

[0330] Nucleotide sequences of the VGAM26 precursor RNA, herein designated VGAM PRECURSOR RNA, and of the diced VGAM26 RNA, herein designated VGAM RNA, and a schematic representation of the secondary folding of VGAM26 folded precursor RNA, herein designated VGAM FOLDED PRECURSOR RNA, of VGAM26 are further described hereinbelow with reference to Table 1.

[0331] Nucleotide sequences of host target binding sites, such as BINDING SITE-I, BINDING SITE-II and BINDING SITE-III of FIG. 1, found on, and schematic representation of the complementarity of each of these host target binding sites to VGAM26 RNA, herein designated VGAM RNA, are described hereinbelow with reference to Table 2.

[0332] FIG. 1 further provides a conceptual description of another novel bioinformatically detected viral gene of the present invention, referred to here as Viral Genomic Address Messenger 27 (VGAM27) viral gene, which modulates expression of respective host target genes thereof, the function and utility of which host target genes is known in the art.

[0333] VGAM27 is a novel bioinformatically detected regulatory, non protein coding, viral micro RNA (miRNA) gene. The method by which VGAM27 was detected is described hereinabove with reference to FIGS. 2-8.

[0334] VGAM27 gene, herein designated VGAM GENE, is a viral gene contained in the genome of Vaccinia virus. VGAM27 host target gene, herein designated VGAM HOST TARGET GENE, is a human gene contained in the human genome.

[0335] VGAM27 gene, herein designated VGAM GENE, encodes a VGAM27 precursor RNA, herein designated VGAM PRECURSOR RNA. Similar to other miRNA genes, and unlike most ordinary genes, VGAM27 precursor RNA, herein designated VGAM PRECURSOR RNA, does not encode a protein. A nucleotide sequence identical or highly similar to the nucleotide sequence of VGAM27 precursor RNA is designated SEQ ID:13, and is provided hereinbelow with reference to the sequence listing part. Nucleotide sequence SEQ ID:13 is located at position 190758 relative to the genome of Vaccinia virus.

[0336] VGAM27 precursor RNA, herein designated VGAM PRECURSOR RNA, folds onto itself, forming VGAM27 folded precursor RNA, herein designated VGAM FOLDED PRECURSOR RNA, which has a two-dimensional hairpin structure. As is well known in the art, this hairpin structure, is typical of RNA encoded by miRNA genes, and is due to the fact that the nucleotide sequence of the first half of the RNA encoded by a miRNA gene is an accurate or partial inversed-reversed sequence of the nucleotide sequence of the second half thereof.

[0337] An enzyme complex designated DICER COMPLEX, dices the VGAM27 folded precursor RNA, herein designated VGAM FOLDED PRECURSOR RNA, into VGAM27 RNA, herein designated VGAM RNA, a single stranded ˜22 nt long RNA segment. As is known in the art, dicing of a hairpin structured RNA precursor product into a short ˜22 nt RNA segment is catalyzed by an enzyme complex comprising an enzyme called Dicer together with other necessary proteins. A probable (over 75%) nucleotide sequence of VGAM27 RNA is designated SEQ ID:362, and is provided hereinbelow with reference to the sequence listing part.

[0338] VGAM27 host target gene, herein designated VGAM HOST TARGET GENE, encodes a corresponding messenger RNA, VGAM27 host target RNA, herein designated VGAM HOST TARGET RNA. VGAM27 host target RNA, herein designated VGAM HOST TARGET RNA, comprises three regions, as is typical of mRNA of a protein coding gene: a 5 untranslated region, a protein coding region and a 3 untranslated region, designated 5UTR, PROTEIN CODING and 3UTR respectively.

[0339] VGAM27 RNA, herein designated VGAM RNA, binds complementarily to one or more host target binding sites located in untranslated regions of VGAM27 host target RNA, herein designated VGAM HOST TARGET RNA. This complementary binding is due to the fact that the nucleotide sequence of VGAM27 RNA, herein designated VGAM RNA, is an accurate or a partial inversed-reversed sequence of the nucleotide sequence of each of the host target binding sites. As an illustration, FIG. 1 shows 3 such host target binding sites, designated BINDING SITE I, BINDING SITE II and BINDING SITE III respectively. It is appreciated that the number of host target binding sites shown in FIG. 1 is meant as an illustration only, and is not meant to be limiting VGAM27 RNA, herein designated VGAM RNA, may have a different number of host target binding sites in untranslated regions of a VGAM27 host target RNA, herein designated VGAM HOST TARGET RNA. It is further appreciated that while FIG. 1 depicts host target binding sites in the 3UTR region, this is meant as an example only these host target binding sites may be located in the 3UTR region, the 5UTR region, or in both 3UTR and 5UTR regions.

[0340] The complementary binding of VGAM27 RNA, herein designated VGAM RNA, to host target binding sites on VGAM27 host target RNA, herein designated VGAM HOST TARGET RNA, such as BINDING SITE I, BINDING SITE II and BINDING SITE III, inhibits translation of VGAM27 host target RNA, herein designated VGAM HOST TARGET RNA, into VGAM27 host target protein, herein designated VGAM HOST TARGET PROTEIN. VGAM host target protein is therefore outlined by a broken line.

[0341] It is appreciated that VGAM27 host target gene, herein designated VGAM HOST TARGET GENE, in fact represents a plurality of VGAM27 host target genes. The mRNA of each one of this plurality of VGAM27 host target genes comprises one or more host target binding sites, each having a nucleotide sequence which is at least partly complementary to VGAM27 RNA, herein designated VGAM RNA, and which when bound by VGAM27 RNA, herein designated VGAM RNA, causes inhibition of translation of respective one or more VGAM27 host target proteins.

[0342] It is further appreciated by one skilled in the art that the mode of translational inhibition illustrated by FIG. 1 with specific reference to translational inhibition exerted by VGAM27 gene, herein designated VGAM GENE, on one or more VGAM27 host target gene, herein designated VGAM HOST TARGET GENE, is in fact common to other known non-viral miRNA genes. As mentioned hereinabove with reference to the background section, although a specific complementary binding site has been demonstrated only for some of the known miRNA genes (primarily Lin-4 and Let-7), all other recently discovered miRNA genes are also believed by those skilled in the art to modulate expression of other genes by complementary binding, although specific complementary binding sites of these other miRNA genes have not yet been found (Ruvkun G., Perspective: Glimpses of a tiny RNA world, Science 294, 779 (2001)).

[0343] It is yet further appreciated that a function of VGAM27 is inhibition of expression of host target genes, as part of a novel viral mechanism of attacking a host. Accordingly, utilities of VGAM27 include diagnosis, prevention and treatment of viral infection by Vaccinia virus. Specific functions, and accordingly utilities, of VGAM27 correlate with, and may be deduced from, the identity of the host target genes which VGAM27 binds and inhibits, and the function of these host target genes, as elaborated hereinbelow.

[0344] Nucleotide sequences of the VGAM27 precursor RNA, herein designated VGAM PRECURSOR RNA, and of the diced VGAM27 RNA, herein designated VGAM RNA, and a schematic representation of the secondary folding of VGAM27 folded precursor RNA, herein designated VGAM FOLDED PRECURSOR RNA, of VGAM27 are further described hereinbelow with reference to Table 1.

[0345] Nucleotide sequences of host target binding sites, such as BINDING SITE-I, BINDING SITE-II and BINDING SITE-III of FIG. 1, found on, and schematic representation of the complementarity of each of these host target binding sites to VGAM27 RNA, herein designated VGAM RNA, are described hereinbelow with reference to Table 2.

[0346] FIG. 1 further provides a conceptual description of another novel bioinformatically detected viral gene of the present invention, referred to here as Viral Genomic Address Messenger 28 (VGAM28) viral gene, which modulates expression of respective host target genes thereof, the function and utility of which host target genes is known in the art.

[0347] VGAM28 is a novel bioinformatically detected regulatory, non protein coding, viral micro RNA (miRNA) gene. The method by which VGAM28 was detected is described hereinabove with reference to FIGS. 2-8.

[0348] VGAM28 gene, herein designated VGAM GENE, is a viral gene contained in the genome of Vaccinia virus. VGAM28 host target gene, herein designated VGAM HOST TARGET GENE, is a human gene contained in the human genome.

[0349] VGAM28 gene, herein designated VGAM GENE, encodes a VGAM28 precursor RNA, herein designated VGAM PRECURSOR RNA. Similar to other miRNA genes, and unlike most ordinary genes, VGAM28 precursor RNA, herein designated VGAM PRECURSOR RNA, does not encode a protein. A nucleotide sequence identical or highly similar to the nucleotide sequence of VGAM28 precursor RNA is designated SEQ ID:14, and is provided hereinbelow with reference to the sequence listing part. Nucleotide sequence SEQ ID: 14 is located at position 190758 relative to the genome of Vaccinia virus.

[0350] VGAM28 precursor RNA, herein designated VGAM PRECURSOR RNA, folds onto itself, forming VGAM28 folded precursor RNA, herein designated VGAM FOLDED PRECURSOR RNA, which has a two-dimensional hairpin structure. As is well known in the art, this hairpin structure, is typical of RNA encoded by miRNA genes, and is due to the fact that the nucleotide sequence of the first half of the RNA encoded by a miRNA gene is an accurate or partial inversed-reversed sequence of the nucleotide sequence of the second half thereof.

[0351] An enzyme complex designated DICER COMPLEX, dices the VGAM28 folded precursor RNA, herein designated VGAM FOLDED PRECURSOR RNA, into VGAM28 RNA, herein designated VGAM RNA, a single stranded ˜22 nt long RNA segment. As is known in the art, dicing of a hairpin structured RNA precursor product into a short ˜22 nt RNA segment is catalyzed by an enzyme complex comprising an enzyme called Dicer together with other necessary proteins. A probable (over 75%) nucleotide sequence of VGAM28 RNA is designated SEQ ID:363, and is provided hereinbelow with reference to the sequence listing part.

[0352] VGAM28 host target gene, herein designated VGAM HOST TARGET GENE, encodes a corresponding messenger RNA, VGAM28 host target RNA, herein designated VGAM HOST TARGET RNA. VGAM28 host target RNA, herein designated VGAM HOST TARGET RNA, comprises three regions, as is typical of mRNA of a protein coding gene: a 5 untranslated region, a protein coding region and a 3 untranslated region, designated 5UTR, PROTEIN CODING and 3UTR respectively.

[0353] VGAM28 RNA, herein designated VGAM RNA, binds complementarily to one or more host target binding sites located in untranslated regions of VGAM28 host target RNA, herein designated VGAM HOST TARGET RNA. This complementary binding is due to the fact that the nucleotide sequence of VGAM28 RNA, herein designated VGAM RNA, is an accurate or a partial inversed-reversed sequence of the nucleotide sequence of each of the host target binding sites. As an illustration, FIG. 1 shows 3 such host target binding sites, designated BINDING SITE I, BINDING SITE II and BINDING SITE III respectively. It is appreciated that the number of host target binding sites shown in FIG. 1 is meant as an illustration only, and is not meant to be limiting VGAM28 RNA, herein designated VGAM RNA, may have a different number of host target binding sites in untranslated regions of a VGAM28 host target RNA, herein designated VGAM HOST TARGET RNA. It is further appreciated that while FIG. 1 depicts host target binding sites in the 3UTR region, this is meant as an example only these host target binding sites may be located in the 3UTR region, the 5UTR region, or in both 3UTR and 5UTR regions.

[0354] The complementary binding of VGAM28 RNA, herein designated VGAM RNA, to host target binding sites on VGAM28 host target RNA, herein designated VGAM HOST TARGET RNA, such as BINDING SITE I, BINDING SITE II and BINDING SITE III, inhibits translation of VGAM28 host target RNA, herein designated VGAM HOST TARGET RNA, into VGAM28 host target protein, herein designated VGAM HOST TARGET PROTEIN. VGAM host target protein is therefore outlined by a broken line.

[0355] It is appreciated that VGAM28 host target gene, herein designated VGAM HOST TARGET GENE, in fact represents a plurality of VGAM28 host target genes. The mRNA of each one of this plurality of VGAM28 host target genes comprises one or more host target binding sites, each having a nucleotide sequence which is at least partly complementary to VGAM28 RNA, herein designated VGAM RNA, and which when bound by VGAM28 RNA, herein designated VGAM RNA, causes inhibition of translation of respective one or more VGAM28 host target proteins.

[0356] It is further appreciated by one skilled in the art that the mode of translational inhibition illustrated by FIG. 1 with specific reference to translational inhibition exerted by VGAM28 gene, herein designated VGAM GENE, on one or more VGAM28 host target gene, herein designated VGAM HOST TARGET GENE, is in fact common to other known non-viral miRNA genes. As mentioned hereinabove with reference to the background section, although a specific complementary binding site has been demonstrated only for some of the known miRNA genes (primarily Lin-4 and Let-7), all other recently discovered miRNA genes are also believed by those skilled in the art to modulate expression of other genes by complementary binding, although specific complementary binding sites of these other miRNA genes have not yet been found (Ruvkun G., Perspective: Glimpses of a tiny RNA world, Science 294, 779 (2001)).

[0357] It is yet further appreciated that a function of VGAM28 is inhibition of expression of host target genes, as part of a novel viral mechanism of attacking a host. Accordingly, utilities of VGAM28 include diagnosis, prevention and treatment of viral infection by Vaccinia virus. Specific functions, and accordingly utilities, of VGAM28 correlate with, and may be deduced from, the identity of the host target genes which VGAM28 binds and inhibits, and the function of these host target genes, as elaborated hereinbelow.

[0358] Nucleotide sequences of the VGAM28 precursor RNA, herein designated VGAM PRECURSOR RNA, and of the diced VGAM28 RNA, herein designated VGAM RNA, and a schematic representation of the secondary folding of VGAM28 folded precursor RNA, herein designated VGAM FOLDED PRECURSOR RNA, of VGAM28 are further described hereinbelow with reference to Table 1.

[0359] Nucleotide sequences of host target binding sites, such as BINDING SITE-I, BINDING SITE-II and BINDING SITE-III of FIG. 1, found on, and schematic representation of the complementarity of each of these host target binding sites to VGAM28 RNA, herein designated VGAM RNA, are described hereinbelow with reference to Table 2.

[0360] FIG. 1 further provides a conceptual description of another novel bioinformatically detected viral gene of the present invention, referred to here as Viral Genomic Address Messenger 29 (VGAM29) viral gene, which modulates expression of respective host target genes thereof, the function and utility of which host target genes is known in the art.

[0361] VGAM29 is a novel bioinformatically detected regulatory, non protein coding, viral micro RNA (miRNA) gene. The method by which VGAM29 was detected is described hereinabove with reference to FIGS. 2-8.

[0362] VGAM29 gene, herein designated VGAM GENE, is a viral gene contained in the genome of Vaccinia virus. VGAM29 host target gene, herein designated VGAM HOST TARGET GENE, is a human gene contained in the human genome.

[0363] VGAM29 gene, herein designated VGAM GENE, encodes a VGAM29 precursor RNA, herein designated VGAM PRECURSOR RNA. Similar to other miRNA genes, and unlike most ordinary genes, VGAM29 precursor RNA, herein designated VGAM PRECURSOR RNA, does not encode a protein. A nucleotide sequence identical or highly similar to the nucleotide sequence of VGAM29 precursor RNA is designated SEQ ID:15, and is provided hereinbelow with reference to the sequence listing part. Nucleotide sequence SEQ ID:15 is located at position 188937 relative to the genome of Vaccinia virus.

[0364] VGAM29 precursor RNA, herein designated VGAM PRECURSOR RNA, folds onto itself, forming VGAM29 folded precursor RNA, herein designated VGAM FOLDED PRECURSOR RNA, which has a two-dimensional hairpin structure. As is well known in the art, this hairpin structure, is typical of RNA encoded by miRNA genes, and is due to the fact that the nucleotide sequence of the first half of the RNA encoded by a miRNA gene is an accurate or partial inversed-reversed sequence of the nucleotide sequence of the second half thereof.

[0365] An enzyme complex designated DICER COMPLEX, dices the VGAM29 folded precursor RNA, herein designated VGAM FOLDED PRECURSOR RNA, into VGAM29 RNA, herein designated VGAM RNA, a single stranded ˜22 nt long RNA segment. As is known in the art, dicing of a hairpin structured RNA precursor product into a short ˜22 nt RNA segment is catalyzed by an enzyme complex comprising an enzyme called Dicer together with other necessary proteins. A probable (over 77%) nucleotide sequence of VGAM29 RNA is designated SEQ ID:364, and is provided hereinbelow with reference to the sequence listing part.

[0366] VGAM29 host target gene, herein designated VGAM HOST TARGET GENE, encodes a corresponding messenger RNA, VGAM29 host target RNA, herein designated VGAM HOST TARGET RNA. VGAM29 host target RNA, herein designated VGAM HOST TARGET RNA, comprises three regions, as is typical of mRNA of a protein coding gene: a 5 untranslated region, a protein coding region and a 3 untranslated region, designated 5UTR, PROTEIN CODING and 3UTR respectively.

[0367] VGAM29 RNA, herein designated VGAM RNA, binds complementarily to one or more host target binding sites located in untranslated regions of VGAM29 host target RNA, herein designated VGAM HOST TARGET RNA. This complementary binding is due to the fact that the nucleotide sequence of VGAM29 RNA, herein designated VGAM RNA, is an accurate or a partial inversed-reversed sequence of the nucleotide sequence of each of the host target binding sites. As an illustration, FIG. 1 shows 3 such host target binding sites, designated BINDING SITE I, BINDING SITE II and BINDING SITE III respectively. It is appreciated that the number of host target binding sites shown in FIG. 1 is meant as an illustration only, and is not meant to be limiting VGAM29 RNA, herein designated VGAM RNA, may have a different number of host target binding sites in untranslated regions of a VGAM29 host target RNA, herein designated VGAM HOST TARGET RNA. It is further appreciated that while FIG. 1 depicts host target binding sites in the 3UTR region, this is meant as an example only these host target binding sites may be located in the 3UTR region, the 5UTR region, or in both 3UTR and 5UTR regions.

[0368] The complementary binding of VGAM29 RNA, herein designated VGAM RNA, to host target binding sites on VGAM29 host target RNA, herein designated VGAM HOST TARGET RNA, such as BINDING SITE I, BINDING SITE II and BINDING SITE III, inhibits translation of VGAM29 host target RNA, herein designated VGAM HOST TARGET RNA, into VGAM29 host target protein, herein designated VGAM HOST TARGET PROTEIN. VGAM host target protein is therefore outlined by a broken line.

[0369] It is appreciated that VGAM29 host target gene, herein designated VGAM HOST TARGET GENE, in fact represents a plurality of VGAM29 host target genes. The mRNA of each one of this plurality of VGAM29 host target genes comprises one or more host target binding sites, each having a nucleotide sequence which is at least partly complementary to VGAM29 RNA, herein designated VGAM RNA, and which when bound by VGAM29 RNA, herein designated VGAM RNA, causes inhibition of translation of respective one or more VGAM29 host target proteins.

[0370] It is further appreciated by one skilled in the art that the mode of translational inhibition illustrated by FIG. 1 with specific reference to translational inhibition exerted by VGAM29 gene, herein designated VGAM GENE, on one or more VGAM29 host target gene, herein designated VGAM HOST TARGET GENE, is in fact common to other known non-viral miRNA genes. As mentioned hereinabove with reference to the background section, although a specific complementary binding site has been demonstrated only for some of the known miRNA genes (primarily Lin-4 and Let-7), all other recently discovered miRNA genes are also believed by those skilled in the art to modulate expression of other genes by complementary binding, although specific complementary binding sites of these other miRNA genes have not yet been found (Ruvkun G., Perspective: Glimpses of a tiny RNA world, Science 294, 779 (2001)).

[0371] It is yet further appreciated that a function of VGAM29 is inhibition of expression of host target genes, as part of a novel viral mechanism of attacking a host. Accordingly, utilities of VGAM29 include diagnosis, prevention and treatment of viral infection by Vaccinia virus. Specific functions, and accordingly utilities, of VGAM29 correlate with, and may be deduced from, the identity of the host target genes which VGAM29 binds and inhibits, and the function of these host target genes, as elaborated hereinbelow.

[0372] Nucleotide sequences of the VGAM29 precursor RNA, herein designated VGAM PRECURSOR RNA, and of the diced VGAM29 RNA, herein designated VGAM RNA, and a schematic representation of the secondary folding of VGAM29 folded precursor RNA, herein designated VGAM FOLDED PRECURSOR RNA, of VGAM29 are further described hereinbelow with reference to Table 1.

[0373] Nucleotide sequences of host target binding sites, such as BINDING SITE-I, BINDING SITE-II and BINDING SITE-III of FIG. 1, found on, and schematic representation of the complementarity of each of these host target binding sites to VGAM29 RNA, herein designated VGAM RNA, are described hereinbelow with reference to Table 2.

[0374] FIG. 1 further provides a conceptual description of another novel bioinformatically detected viral gene of the present invention, referred to here as Viral Genomic Address Messenger 30 (VGAM30) viral gene, which modulates expression of respective host target genes thereof, the function and utility of which host target genes is known in the art.

[0375] VGAM30 is a novel bioinformatically detected regulatory, non protein coding, viral micro RNA (miRNA) gene. The method by which VGAM30 was detected is described hereinabove with reference to FIGS. 2-8.

[0376] VGAM30 gene, herein designated VGAM GENE, is a viral gene contained in the genome of Vaccinia virus. VGAM30 host target gene, herein designated VGAM HOST TARGET GENE, is a human gene contained in the human genome.

[0377] VGAM30 gene, herein designated VGAM GENE, encodes a VGAM30 precursor RNA, herein designated VGAM PRECURSOR RNA. Similar to other miRNA genes, and unlike most ordinary genes, VGAM30 precursor RNA, herein designated VGAM PRECURSOR RNA, does not encode a protein. A nucleotide sequence identical or highly similar to the nucleotide sequence of VGAM30 precursor RNA is designated SEQ ID:16, and is provided hereinbelow with reference to the sequence listing part. Nucleotide sequence SEQ ID: 16 is located at position 187719 relative to the genome of Vaccinia virus.

[0378] VGAM30 precursor RNA, herein designated VGAM PRECURSOR RNA, folds onto itself, forming VGAM30 folded precursor RNA, herein designated VGAM FOLDED PRECURSOR RNA, which has a two-dimensional hairpin structure. As is well known in the art, this hairpin structure, is typical of RNA encoded by miRNA genes, and is due to the fact that the nucleotide sequence of the first half of the RNA encoded by a miRNA gene is an accurate or partial inversed-reversed sequence of the nucleotide sequence of the second half thereof.

[0379] An enzyme complex designated DICER COMPLEX, dices the VGAM30 folded precursor RNA, herein designated VGAM FOLDED PRECURSOR RNA, into VGAM30 RNA, herein designated VGAM RNA, a single stranded ˜22 nt long RNA segment. As is known in the art, dicing of a hairpin structured RNA precursor product into a short ˜22 nt RNA segment is catalyzed by an enzyme complex comprising an enzyme called Dicer together with other necessary proteins. A probable (over 88%) nucleotide sequence of VGAM30 RNA is designated SEQ ID:365, and is provided hereinbelow with reference to the sequence listing part.

[0380] VGAM30 host target gene, herein designated VGAM HOST TARGET GENE, encodes a corresponding messenger RNA, VGAM30 host target RNA, herein designated VGAM HOST TARGET RNA. VGAM30 host target RNA, herein designated VGAM HOST TARGET RNA, comprises three regions, as is typical of mRNA of a protein coding gene: a 5 untranslated region, a protein coding region and a 3 untranslated region, designated 5UTR, PROTEIN CODING and 3UTR respectively.

[0381] VGAM30 RNA, herein designated VGAM RNA, binds complementarily to one or more host target binding sites located in untranslated regions of VGAM30 host target RNA, herein designated VGAM HOST TARGET RNA. This complementary binding is due to the fact that the nucleotide sequence of VGAM30 RNA, herein designated VGAM RNA, is an accurate or a partial inversed-reversed sequence of the nucleotide sequence of each of the host target binding sites. As an illustration, FIG. 1 shows 3 such host target binding sites, designated BINDING SITE I, BINDING SITE II and BINDING SITE III respectively. It is appreciated that the number of host target binding sites shown in FIG. 1 is meant as an illustration only, and is not meant to be limiting VGAM30 RNA, herein designated VGAM RNA, may have a different number of host target binding sites in untranslated regions of a VGAM30 host target RNA, herein designated VGAM HOST TARGET RNA. It is further appreciated that while FIG. 1 depicts host target binding sites in the 3UTR region, this is meant as an example only these host target binding sites may be located in the 3UTR region, the 5UTR region, or in both 3UTR and 5UTR regions.

[0382] The complementary binding of VGAM30 RNA, herein designated VGAM RNA, to host target binding sites on VGAM30 host target RNA, herein designated VGAM HOST TARGET RNA, such as BINDING SITE I, BINDING SITE II and BINDING SITE III, inhibits translation of VGAM30 host target RNA, herein designated VGAM HOST TARGET RNA, into VGAM30 host target protein, herein designated VGAM HOST TARGET PROTEIN. VGAM host target protein is therefore outlined by a broken line.

[0383] It is appreciated that VGAM30 host target gene, herein designated VGAM HOST TARGET GENE, in fact represents a plurality of VGAM30 host target genes. The mRNA of each one of this plurality of VGAM30 host target genes comprises one or more host target binding sites, each having a nucleotide sequence which is at least partly complementary to VGAM30 RNA, herein designated VGAM RNA, and which when bound by VGAM30 RNA, herein designated VGAM RNA, causes inhibition of translation of respective one or more VGAM30 host target proteins.

[0384] It is further appreciated by one skilled in the art that the mode of translational inhibition illustrated by FIG. 1 with specific reference to translational inhibition exerted by VGAM30 gene, herein designated VGAM GENE, on one or more VGAM30 host target gene, herein designated VGAM HOST TARGET GENE, is in fact common to other known non-viral miRNA genes. As mentioned hereinabove with reference to the background section, although a specific complementary binding site has been demonstrated only for some of the known miRNA genes (primarily Lin-4 and Let-7), all other recently discovered miRNA genes are also believed by those skilled in the art to modulate expression of other genes by complementary binding, although specific complementary binding sites of these other miRNA genes have not yet been found (Ruvkun G., Perspective: Glimpses of a tiny RNA world, Science 294, 779 (2001)).

[0385] It is yet further appreciated that a function of VGAM30 is inhibition of expression of host target genes, as part of a novel viral mechanism of attacking a host. Accordingly, utilities of VGAM30 include diagnosis, prevention and treatment of viral infection by Vaccinia virus. Specific functions, and accordingly utilities, of VGAM30 correlate with, and may be deduced from, the identity of the host target genes which VGAM30 binds and inhibits, and the function of these host target genes, as elaborated hereinbelow.

[0386] Nucleotide sequences of the VGAM30 precursor RNA, herein designated VGAM PRECURSOR RNA, and of the diced VGAM30 RNA, herein designated VGAM RNA, and a schematic representation of the secondary folding of VGAM30 folded precursor RNA, herein designated VGAM FOLDED PRECURSOR RNA, of VGAM30 are further described hereinbelow with reference to Table 1.

[0387] Nucleotide sequences of host target binding sites, such as BINDING SITE-I, BINDING SITE-II and BINDING SITE-III of FIG. 1, found on, and schematic representation of the complementarity of each of these host target binding sites to VGAM30 RNA, herein designated VGAM RNA, are described hereinbelow with reference to Table 2.

[0388] FIG. 1 further provides a conceptual description of another novel bioinformatically detected viral gene of the present invention, referred to here as Viral Genomic Address Messenger 31 (VGAM31) viral gene, which modulates expression of respective host target genes thereof, the function and utility of which host target genes is known in the art.

[0389] VGAM31 is a novel bioinformatically detected regulatory, non protein coding, viral micro RNA (miRNA) gene. The method by which VGAM31 was detected is described hereinabove with reference to FIGS. 2-8.

[0390] VGAM31 gene, herein designated VGAM GENE, is a viral gene contained in the genome of Vaccinia virus. VGAM31 host target gene, herein designated VGAM HOST TARGET GENE, is a human gene contained in the human genome.

[0391] VGAM31 gene, herein designated VGAM GENE, encodes a VGAM31 precursor RNA, herein designated VGAM PRECURSOR RNA. Similar to other miRNA genes, and unlike most ordinary genes, VGAM31 precursor RNA, herein designated VGAM PRECURSOR RNA, does not encode a protein. A nucleotide sequence identical or highly similar to the nucleotide sequence of VGAM31 precursor RNA is designated SEQ ID:17, and is provided hereinbelow with reference to the sequence listing part. Nucleotide sequence SEQ ID:17 is located at position 188420 relative to the genome of Vaccinia virus.

[0392] VGAM31 precursor RNA, herein designated VGAM PRECURSOR RNA, folds onto itself, forming VGAM31 folded precursor RNA, herein designated VGAM FOLDED PRECURSOR RNA, which has a two-dimensional hairpin structure. As is well known in the art, this hairpin structure, is typical of RNA encoded by miRNA genes, and is due to the fact that the nucleotide sequence of the first half of the RNA encoded by a miRNA gene is an accurate or partial inversed-reversed sequence of the nucleotide sequence of the second half thereof.

[0393] An enzyme complex designated DICER COMPLEX, dices the VGAM31 folded precursor RNA, herein designated VGAM FOLDED PRECURSOR RNA, into VGAM31 RNA, herein designated VGAM RNA, a single stranded ˜22 nt long RNA segment. As is known in the art, dicing of a hairpin structured RNA precursor product into a short ˜22 nt RNA segment is catalyzed by an enzyme complex comprising an enzyme called Dicer together with other necessary proteins. A probable (over 80%) nucleotide sequence of VGAM31 RNA is designated SEQ ID:366, and is provided hereinbelow with reference to the sequence listing part.

[0394] VGAM31 host target gene, herein designated VGAM HOST TARGET GENE, encodes a corresponding messenger RNA, VGAM31 host target RNA, herein designated VGAM HOST TARGET RNA. VGAM31 host target RNA, herein designated VGAM HOST TARGET RNA, comprises three regions, as is typical of mRNA of a protein coding gene: a 5 untranslated region, a protein coding region and a 3 untranslated region, designated 5UTR, PROTEIN CODING and 3UTR respectively.

[0395] VGAM31 RNA, herein designated VGAM RNA, binds complementarily to one or more host target binding sites located in untranslated regions of VGAM31 host target RNA, herein designated VGAM HOST TARGET RNA. This complementary binding is due to the fact that the nucleotide sequence of VGAM31 RNA, herein designated VGAM RNA, is an accurate or a partial inversed-reversed sequence of the nucleotide sequence of each of the host target binding sites. As an illustration, FIG. 1 shows 3 such host target binding sites, designated BINDING SITE I, BINDING SITE II and BINDING SITE III respectively. It is appreciated that the number of host target binding sites shown in FIG. 1 is meant as an illustration only, and is not meant to be limiting VGAM31 RNA, herein designated VGAM RNA, may have a different number of host target binding sites in untranslated regions of a VGAM31 host target RNA, herein designated VGAM HOST TARGET RNA. It is further appreciated that while FIG. 1 depicts host target binding sites in the 3UTR region, this is meant as an example only these host target binding sites may be located in the 3UTR region, the 5UTR region, or in both 3UTR and 5UTR regions.

[0396] The complementary binding of VGAM31 RNA, herein designated VGAM RNA, to host target binding sites on VGAM31 host target RNA, herein designated VGAM HOST TARGET RNA, such as BINDING SITE I, BINDING SITE II and BINDING SITE III, inhibits translation of VGAM31 host target RNA, herein designated VGAM HOST TARGET RNA, into VGAM31 host target protein, herein designated VGAM HOST TARGET PROTEIN. VGAM host target protein is therefore outlined by a broken line.

[0397] It is appreciated that VGAM31 host target gene, herein designated VGAM HOST TARGET GENE, in fact represents a plurality of VGAM31 host target genes. The mRNA of each one of this plurality of VGAM31 host target genes comprises one or more host target binding sites, each having a nucleotide sequence which is at least partly complementary to VGAM31 RNA, herein designated VGAM RNA, and which when bound by VGAM31 RNA, herein designated VGAM RNA, causes inhibition of translation of respective one or more VGAM31 host target proteins.

[0398] It is further appreciated by one skilled in the art that the mode of translational inhibition illustrated by FIG. 1 with specific reference to translational inhibition exerted by VGAM31 gene, herein designated VGAM GENE, on one or more VGAM31 host target gene, herein designated VGAM HOST TARGET GENE, is in fact common to other known non-viral miRNA genes. As mentioned hereinabove with reference to the background section, although a specific complementary binding site has been demonstrated only for some of the known miRNA genes (primarily Lin-4 and Let-7), all other recently discovered miRNA genes are also believed by those skilled in the art to modulate expression of other genes by complementary binding, although specific complementary binding sites of these other miRNA genes have not yet been found (Ruvkun G., Perspective: Glimpses of a tiny RNA world, Science 294, 779 (2001)).

[0399] It is yet further appreciated that a function of VGAM31 is inhibition of expression of host target genes, as part of a novel viral mechanism of attacking a host. Accordingly, utilities of VGAM31 include diagnosis, prevention and treatment of viral infection by Vaccinia virus. Specific functions, and accordingly utilities, of VGAM31 correlate with, and may be deduced from, the identity of the host target genes which VGAM31 binds and inhibits, and the function of these host target genes, as elaborated hereinbelow.

[0400] Nucleotide sequences of the VGAM31 precursor RNA, herein designated VGAM PRECURSOR RNA, and of the diced VGAM31 RNA, herein designated VGAM RNA, and a schematic representation of the secondary folding of VGAM31 folded precursor RNA, herein designated VGAM FOLDED PRECURSOR RNA, of VGAM31 are further described hereinbelow with reference to Table 1.

[0401] Nucleotide sequences of host target binding sites, such as BINDING SITE-I, BINDING SITE-II and BINDING SITE-III of FIG. 1, found on, and schematic representation of the complementarity of each of these host target binding sites to VGAM31 RNA, herein designated VGAM RNA, are described hereinbelow with reference to Table 2.

[0402] FIG. 1 further provides a conceptual description of another novel bioinformatically detected viral gene of the present invention, referred to here as Viral Genomic Address Messenger 32 (VGAM32) viral gene, which modulates expression of respective host target genes thereof, the function and utility of which host target genes is known in the art.

[0403] VGAM32 is a novel bioinformatically detected regulatory, non protein coding, viral micro RNA (miRNA) gene. The method by which VGAM32 was detected is described hereinabove with reference to FIGS. 2-8.

[0404] VGAM32 gene, herein designated VGAM GENE, is a viral gene contained in the genome of Vaccinia virus. VGAM32 host target gene, herein designated VGAM HOST TARGET GENE, is a human gene contained in the human genome.

[0405] VGAM32 gene, herein designated VGAM GENE, encodes a VGAM32 precursor RNA, herein designated VGAM PRECURSOR RNA. Similar to other miRNA genes, and unlike most ordinary genes, VGAM32 precursor RNA, herein designated VGAM PRECURSOR RNA, does not encode a protein. A nucleotide sequence identical or highly similar to the nucleotide sequence of VGAM32 precursor RNA is designated SEQ ID:18, and is provided hereinbelow with reference to the sequence listing part. Nucleotide sequence SEQ ID:18 is located at position 190813 relative to the genome of Vaccinia virus.

[0406] VGAM32 precursor RNA, herein designated VGAM PRECURSOR RNA, folds onto itself, forming VGAM32 folded precursor RNA, herein designated VGAM FOLDED PRECURSOR RNA, which has a two-dimensional hairpin structure. As is well known in the art, this hairpin structure, is typical of RNA encoded by miRNA genes, and is due to the fact that the nucleotide sequence of the first half of the RNA encoded by a miRNA gene is an accurate or partial inversed-reversed sequence of the nucleotide sequence of the second half thereof.

[0407] An enzyme complex designated DICER COMPLEX, dices the VGAM32 folded precursor RNA, herein designated VGAM FOLDED PRECURSOR RNA, into VGAM32 RNA, herein designated VGAM RNA, a single stranded ˜22 nt long RNA segment. As is known in the art, dicing of a hairpin structured RNA precursor product into a short ˜22 nt RNA segment is catalyzed by an enzyme complex comprising an enzyme called Dicer together with other necessary proteins. A probable (over 82%) nucleotide sequence of VGAM32 RNA is designated SEQ ID:367, and is provided hereinbelow with reference to the sequence listing part.

[0408] VGAM32 host target gene, herein designated VGAM HOST TARGET GENE, encodes a corresponding messenger RNA, VGAM32 host target RNA, herein designated VGAM HOST TARGET RNA. VGAM32 host target RNA, herein designated VGAM HOST TARGET RNA, comprises three regions, as is typical of mRNA of a protein coding gene: a 5 untranslated region, a protein coding region and a 3 untranslated region, designated 5UTR, PROTEIN CODING and 3UTR respectively.

[0409] VGAM32 RNA, herein designated VGAM RNA, binds complementarily to one or more host target binding sites located in untranslated regions of VGAM32 host target RNA, herein designated VGAM HOST TARGET RNA. This complementary binding is due to the fact that the nucleotide sequence of VGAM32 RNA, herein designated VGAM RNA, is an accurate or a partial inversed-reversed sequence of the nucleotide sequence of each of the host target binding sites. As an illustration, FIG. 1 shows 3 such host target binding sites, designated BINDING SITE I, BINDING SITE II and BINDING SITE III respectively. It is appreciated that the number of host target binding sites shown in FIG. 1 is meant as an illustration only, and is not meant to be limiting VGAM32 RNA, herein designated VGAM RNA, may have a different number of host target binding sites in untranslated regions of a VGAM32 host target RNA, herein designated VGAM HOST TARGET RNA. It is further appreciated that while FIG. 1 depicts host target binding sites in the 3UTR region, this is meant as an example only these host target binding sites may be located in the 3UTR region, the 5UTR region, or in both 3UTR and 5UTR regions.

[0410] The complementary binding of VGAM32 RNA, herein designated VGAM RNA, to host target binding sites on VGAM32 host target RNA, herein designated VGAM HOST TARGET RNA, such as BINDING SITE I, BINDING SITE II and BINDING SITE III, inhibits translation of VGAM32 host target RNA, herein designated VGAM HOST TARGET RNA, into VGAM32 host target protein, herein designated VGAM HOST TARGET PROTEIN. VGAM host target protein is therefore outlined by a broken line.

[0411] It is appreciated that VGAM32 host target gene, herein designated VGAM HOST TARGET GENE, in fact represents a plurality of VGAM32 host target genes. The mRNA of each one of this plurality of VGAM32 host target genes comprises one or more host target binding sites, each having a nucleotide sequence which is at least partly complementary to VGAM32 RNA, herein designated VGAM RNA, and which when bound by VGAM32 RNA, herein designated VGAM RNA, causes inhibition of translation of respective one or more VGAM32 host target proteins.

[0412] It is further appreciated by one skilled in the art that the mode of translational inhibition illustrated by FIG. 1 with specific reference to translational inhibition exerted by VGAM32 gene, herein designated VGAM GENE, on one or more VGAM32 host target gene, herein designated VGAM HOST TARGET GENE, is in fact common to other known non-viral miRNA genes. As mentioned hereinabove with reference to the background section, although a specific complementary binding site has been demonstrated only for some of the known miRNA genes (primarily Lin-4 and Let-7), all other recently discovered miRNA genes are also believed by those skilled in the art to modulate expression of other genes by complementary binding, although specific complementary binding sites of these other miRNA genes have not yet been found (Ruvkun G., Perspective: Glimpses of a tiny RNA world, Science 294, 779 (2001)).

[0413] It is yet further appreciated that a function of VGAM32 is inhibition of expression of host target genes, as part of a novel viral mechanism of attacking a host. Accordingly, utilities of VGAM32 include diagnosis, prevention and treatment of viral infection by Vaccinia virus. Specific functions, and accordingly utilities, of VGAM32 correlate with, and may be deduced from, the identity of the host target genes which VGAM32 binds and inhibits, and the function of these host target genes, as elaborated hereinbelow.

[0414] Nucleotide sequences of the VGAM32 precursor RNA, herein designated VGAM PRECURSOR RNA, and of the diced VGAM32 RNA, herein designated VGAM RNA, and a schematic representation of the secondary folding of VGAM32 folded precursor RNA, herein designated VGAM FOLDED PRECURSOR RNA, of VGAM32 are further described hereinbelow with reference to Table 1.

[0415] Nucleotide sequences of host target binding sites, such as BINDING SITE-I, BINDING SITE-II and BINDING SITE-III of FIG. 1, found on, and schematic representation of the complementarity of each of these host target binding sites to VGAM32 RNA, herein designated VGAM RNA, are described hereinbelow with reference to Table 2.

[0416] FIG. 1 further provides a conceptual description of another novel bioinformatically detected viral gene of the present invention, referred to here as Viral Genomic Address Messenger 33 (VGAM33) viral gene, which modulates expression of respective host target genes thereof, the function and utility of which host target genes is known in the art.

[0417] VGAM33 is a novel bioinformatically detected regulatory, non protein coding, viral micro RNA (miRNA) gene. The method by which VGAM33 was detected is described hereinabove with reference to FIGS. 2-8.

[0418] VGAM33 gene, herein designated VGAM GENE, is a viral gene contained in the genome of Vaccinia virus. VGAM33 host target gene, herein designated VGAM HOST TARGET GENE, is a human gene contained in the human genome.

[0419] VGAM33 gene, herein designated VGAM GENE, encodes a VGAM33 precursor RNA, herein designated VGAM PRECURSOR RNA. Similar to other miRNA genes, and unlike most ordinary genes, VGAM33 precursor RNA, herein designated VGAM PRECURSOR RNA, does not encode a protein. A nucleotide sequence identical or highly similar to the nucleotide sequence of VGAM33 precursor RNA is designated SEQ ID:19, and is provided hereinbelow with reference to the sequence listing part. Nucleotide sequence SEQ ID:19 is located at position 190813 relative to the genome of Vaccinia virus.

[0420] VGAM33 precursor RNA, herein designated VGAM PRECURSOR RNA, folds onto itself, forming VGAM33 folded precursor RNA, herein designated VGAM FOLDED PRECURSOR RNA, which has a two-dimensional hairpin structure. As is well known in the art, this hairpin structure, is typical of RNA encoded by miRNA genes, and is due to the fact that the nucleotide sequence of the first half of the RNA encoded by a miRNA gene is an accurate or partial inversed-reversed sequence of the nucleotide sequence of the second half thereof.

[0421] An enzyme complex designated DICER COMPLEX, dices the VGAM33 folded precursor RNA, herein designated VGAM FOLDED PRECURSOR RNA, into VGAM33 RNA, herein designated VGAM RNA, a single stranded ˜22 nt long RNA segment. As is known in the art, dicing of a hairpin structured RNA precursor product into a short ˜22 nt RNA segment is catalyzed by an enzyme complex comprising an enzyme called Dicer together with other necessary proteins. A probable (over 82%) nucleotide sequence of VGAM33 RNA is designated SEQ ID:368, and is provided hereinbelow with reference to the sequence listing part.

[0422] VGAM33 host target gene, herein designated VGAM HOST TARGET GENE, encodes a corresponding messenger RNA, VGAM33 host target RNA, herein designated VGAM HOST TARGET RNA. VGAM33 host target RNA, herein designated VGAM HOST TARGET RNA, comprises three regions, as is typical of mRNA of a protein coding gene: a 5 untranslated region, a protein coding region and a 3 untranslated region, designated 5UTR, PROTEIN CODING and 3UTR respectively.

[0423] VGAM33 RNA, herein designated VGAM RNA, binds complementarily to one or more host target binding sites located in untranslated regions of VGAM33 host target RNA, herein designated VGAM HOST TARGET RNA. This complementary binding is due to the fact that the nucleotide sequence of VGAM33 RNA, herein designated VGAM RNA, is an accurate or a partial inversed-reversed sequence of the nucleotide sequence of each of the host target binding sites. As an illustration, FIG. 1 shows 3 such host target binding sites, designated BINDING SITE I, BINDING SITE II and BINDING SITE III respectively. It is appreciated that the number of host target binding sites shown in FIG. 1 is meant as an illustration only, and is not meant to be limiting VGAM33 RNA, herein designated VGAM RNA, may have a different number of host target binding sites in untranslated regions of a VGAM33 host target RNA, herein designated VGAM HOST TARGET RNA. It is further appreciated that while FIG. 1 depicts host target binding sites in the 3UTR region, this is meant as an example only these host target binding sites may be located in the 3UTR region, the 5UTR region, or in both 3UTR and 5UTR regions.

[0424] The complementary binding of VGAM33 RNA, herein designated VGAM RNA, to host target binding sites on VGAM33 host target RNA, herein designated VGAM HOST TARGET RNA, such as BINDING SITE I, BINDING SITE II and BINDING SITE III, inhibits translation of VGAM33 host target RNA, herein designated VGAM HOST TARGET RNA, into VGAM33 host target protein, herein designated VGAM HOST TARGET PROTEIN. VGAM host target protein is therefore outlined by a broken line.

[0425] It is appreciated that VGAM33 host target gene, herein designated VGAM HOST TARGET GENE, in fact represents a plurality of VGAM33 host target genes. The mRNA of each one of this plurality of VGAM33 host target genes comprises one or more host target binding sites, each having a nucleotide sequence which is at least partly complementary to VGAM33 RNA, herein designated VGAM RNA, and which when bound by VGAM33 RNA, herein designated VGAM RNA, causes inhibition of translation of respective one or more VGAM33 host target proteins.

[0426] It is further appreciated by one skilled in the art that the mode of translational inhibition illustrated by FIG. 1 with specific reference to translational inhibition exerted by VGAM33 gene, herein designated VGAM GENE, on one or more VGAM33 host target gene, herein designated VGAM HOST TARGET GENE, is in fact common to other known non-viral miRNA genes. As mentioned hereinabove with reference to the background section, although a specific complementary binding site has been demonstrated only for some of the known miRNA genes (primarily Lin-4 and Let-7), all other recently discovered miRNA genes are also believed by those skilled in the art to modulate expression of other genes by complementary binding, although specific complementary binding sites of these other miRNA genes have not yet been found (Ruvkun G., Perspective: Glimpses of a tiny RNA world, Science 294, 779 (2001)).

[0427] It is yet further appreciated that a function of VGAM33 is inhibition of expression of host target genes, as part of a novel viral mechanism of attacking a host. Accordingly, utilities of VGAM33 include diagnosis, prevention and treatment of viral infection by Vaccinia virus. Specific functions, and accordingly utilities, of VGAM33 correlate with, and may be deduced from, the identity of the host target genes which VGAM33 binds and inhibits, and the function of these host target genes, as elaborated hereinbelow.

[0428] Nucleotide sequences of the VGAM33 precursor RNA, herein designated VGAM PRECURSOR RNA, and of the diced VGAM33 RNA, herein designated VGAM RNA, and a schematic representation of the secondary folding of VGAM33 folded precursor RNA, herein designated VGAM FOLDED PRECURSOR RNA, of VGAM33 are further described hereinbelow with reference to Table 1.

[0429] Nucleotide sequences of host target binding sites, such as BINDING SITE-I, BINDING SITE-II and BINDING SITE-III of FIG. 1, found on, and schematic representation of the complementarity of each of these host target binding sites to VGAM33 RNA, herein designated VGAM RNA, are described hereinbelow with reference to Table 2.

[0430] FIG. 1 further provides a conceptual description of another novel bioinformatically detected viral gene of the present invention, referred to here as Viral Genomic Address Messenger 34 (VGAM34) viral gene, which modulates expression of respective host target genes thereof, the function and utility of which host target genes is known in the art.

[0431] VGAM34 is a novel bioinformatically detected regulatory, non protein coding, viral micro RNA (miRNA) gene. The method by which VGAM34 was detected is described hereinabove with reference to FIGS. 2-8.

[0432] VGAM34 gene, herein designated VGAM GENE, is a viral gene contained in the genome of Vaccinia virus. VGAM34 host target gene, herein designated VGAM HOST TARGET GENE, is a human gene contained in the human genome.

[0433] VGAM34 gene, herein designated VGAM GENE, encodes a VGAM34 precursor RNA, herein designated VGAM PRECURSOR RNA. Similar to other miRNA genes, and unlike most ordinary genes, VGAM34 precursor RNA, herein designated VGAM PRECURSOR RNA, does not encode a protein. A nucleotide sequence identical or highly similar to the nucleotide sequence of VGAM34 precursor RNA is designated SEQ ID:20, and is provided hereinbelow with reference to the sequence listing part. Nucleotide sequence SEQ ID:20 is located at position 188778 relative to the genome of Vaccinia virus.

[0434] VGAM34 precursor RNA, herein designated VGAM PRECURSOR RNA, folds onto itself, forming VGAM34 folded precursor RNA, herein designated VGAM FOLDED PRECURSOR RNA, which has a two-dimensional hairpin structure. As is well known in the art, this hairpin structure, is typical of RNA encoded by miRNA genes, and is due to the fact that the nucleotide sequence of the first half of the RNA encoded by a miRNA gene is an accurate or partial inversed-reversed sequence of the nucleotide sequence of the second half thereof.

[0435] An enzyme complex designated DICER COMPLEX, dices the VGAM34 folded precursor RNA, herein designated VGAM FOLDED PRECURSOR RNA, into VGAM34 RNA, herein designated VGAM RNA, a single stranded ˜22 nt long RNA segment. As is known in the art, dicing of a hairpin structured RNA precursor product into a short ˜22 nt RNA segment is catalyzed by an enzyme complex comprising an enzyme called Dicer together with other necessary proteins. A probable (over 90%) nucleotide sequence of VGAM34 RNA is designated SEQ ID:369, and is provided hereinbelow with reference to the sequence listing part.

[0436] VGAM34 host target gene, herein designated VGAM HOST TARGET GENE, encodes a corresponding messenger RNA, VGAM34 host target RNA, herein designated VGAM HOST TARGET RNA. VGAM34 host target RNA, herein designated VGAM HOST TARGET RNA, comprises three regions, as is typical of mRNA of a protein coding gene: a 5 untranslated region, a protein coding region and a 3 untranslated region, designated 5UTR, PROTEIN CODING and 3UTR respectively.

[0437] VGAM34 RNA, herein designated VGAM RNA, binds complementarily to one or more host target binding sites located in untranslated regions of VGAM34 host target RNA, herein designated VGAM HOST TARGET RNA. This complementary binding is due to the fact that the nucleotide sequence of VGAM34 RNA, herein designated VGAM RNA, is an accurate or a partial inversed-reversed sequence of the nucleotide sequence of each of the host target binding sites. As an illustration, FIG. 1 shows 3 such host target binding sites, designated BINDING SITE I, BINDING SITE II and BINDING SITE III respectively. It is appreciated that the number of host target binding sites shown in FIG. 1 is meant as an illustration only, and is not meant to be limiting VGAM34 RNA, herein designated VGAM RNA, may have a different number of host target binding sites in untranslated regions of a VGAM34 host target RNA, herein designated VGAM HOST TARGET RNA. It is further appreciated that while FIG. 1 depicts host target binding sites in the 3UTR region, this is meant as an example only these host target binding sites may be located in the 3UTR region, the 5UTR region, or in both 3UTR and 5UTR regions.

[0438] The complementary binding of VGAM34 RNA, herein designated VGAM RNA, to host target binding sites on VGAM34 host target RNA, herein designated VGAM HOST TARGET RNA, such as BINDING SITE I, BINDING SITE II and BINDING SITE III, inhibits translation of VGAM34 host target RNA, herein designated VGAM HOST TARGET RNA, into VGAM34 host target protein, herein designated VGAM HOST TARGET PROTEIN. VGAM host target protein is therefore outlined by a broken line.

[0439] It is appreciated that VGAM34 host target gene, herein designated VGAM HOST TARGET GENE, in fact represents a plurality of VGAM34 host target genes. The mRNA of each one of this plurality of VGAM34 host target genes comprises one or more host target binding sites, each having a nucleotide sequence which is at least partly complementary to VGAM34 RNA, herein designated VGAM RNA, and which when bound by VGAM34 RNA, herein designated VGAM RNA, causes inhibition of translation of respective one or more VGAM34 host target proteins.

[0440] It is further appreciated by one skilled in the art that the mode of translational inhibition illustrated by FIG. 1 with specific reference to translational inhibition exerted by VGAM34 gene, herein designated VGAM GENE, on one or more VGAM34 host target gene, herein designated VGAM HOST TARGET GENE, is in fact common to other known non-viral miRNA genes. As mentioned hereinabove with reference to the background section, although a specific complementary binding site has been demonstrated only for some of the known miRNA genes (primarily Lin-4 and Let-7), all other recently discovered miRNA genes are also believed by those skilled in the art to modulate expression of other genes by complementary binding, although specific complementary binding sites of these other miRNA genes have not yet been found (Ruvkun G., Perspective: Glimpses of a tiny RNA world, Science 294, 779 (2001)).

[0441] It is yet further appreciated that a function of VGAM34 is inhibition of expression of host target genes, as part of a novel viral mechanism of attacking a host. Accordingly, utilities of VGAM34 include diagnosis, prevention and treatment of viral infection by Vaccinia virus. Specific functions, and accordingly utilities, of VGAM34 correlate with, and may be deduced from, the identity of the host target genes which VGAM34 binds and inhibits, and the function of these host target genes, as elaborated hereinbelow.

[0442] Nucleotide sequences of the VGAM34 precursor RNA, herein designated VGAM PRECURSOR RNA, and of the diced VGAM34 RNA, herein designated VGAM RNA, and a schematic representation of the secondary folding of VGAM34 folded precursor RNA, herein designated VGAM FOLDED PRECURSOR RNA, of VGAM34 are further described hereinbelow with reference to Table 1.

[0443] Nucleotide sequences of host target binding sites, such as BINDING SITE-I, BINDING SITE-II and BINDING SITE-III of FIG. 1, found on, and schematic representation of the complementarity of each of these host target binding sites to VGAM34 RNA, herein designated VGAM RNA, are described hereinbelow with reference to Table 2.

[0444] FIG. 1 further provides a conceptual description of another novel bioinformatically detected viral gene of the present invention, referred to here as Viral Genomic Address Messenger 35 (VGAM35) viral gene, which modulates expression of respective host target genes thereof, the function and utility of which host target genes is known in the art.

[0445] VGAM35 is a novel bioinformatically detected regulatory, non protein coding, viral micro RNA (miRNA) gene. The method by which VGAM35 was detected is described hereinabove with reference to FIGS. 2-8.

[0446] VGAM35 gene, herein designated VGAM GENE, is a viral gene contained in the genome of Vaccinia virus. VGAM35 host target gene, herein designated VGAM HOST TARGET GENE, is a human gene contained in the human genome.

[0447] VGAM35 gene, herein designated VGAM GENE, encodes a VGAM35 precursor RNA, herein designated VGAM PRECURSOR RNA. Similar to other miRNA genes, and unlike most ordinary genes, VGAM35 precursor RNA, herein designated VGAM PRECURSOR RNA, does not encode a protein. A nucleotide sequence identical or highly similar to the nucleotide sequence of VGAM35 precursor RNA is designated SEQ ID:21, and is provided hereinbelow with reference to the sequence listing part. Nucleotide sequence SEQ ID:21 is located at position 642 relative to the genome of Vaccinia virus.

[0448] VGAM35 precursor RNA, herein designated VGAM PRECURSOR RNA, folds onto itself, forming VGAM35 folded precursor RNA, herein designated VGAM FOLDED PRECURSOR RNA, which has a two-dimensional hairpin structure. As is well known in the art, this hairpin structure, is typical of RNA encoded by miRNA genes, and is due to the fact that the nucleotide sequence of the first half of the RNA encoded by a miRNA gene is an accurate or partial inversed-reversed sequence of the nucleotide sequence of the second half thereof.

[0449] An enzyme complex designated DICER COMPLEX, dices the VGAM35 folded precursor RNA, herein designated VGAM FOLDED PRECURSOR RNA, into VGAM35 RNA, herein designated VGAM RNA, a single stranded ˜22 nt long RNA segment. As is known in the art, dicing of a hairpin structured RNA precursor product into a short ˜22 nt RNA segment is catalyzed by an enzyme complex comprising an enzyme called Dicer together with other necessary proteins. A probable (over 92%) nucleotide sequence of VGAM35 RNA is designated SEQ ID:370, and is provided hereinbelow with reference to the sequence listing part.

[0450] VGAM35 host target gene, herein designated VGAM HOST TARGET GENE, encodes a corresponding messenger RNA, VGAM35 host target RNA, herein designated VGAM HOST TARGET RNA. VGAM35 host target RNA, herein designated VGAM HOST TARGET RNA, comprises three regions, as is typical of mRNA of a protein coding gene: a 5 untranslated region, a protein coding region and a 3 untranslated region, designated 5UTR, PROTEIN CODING and 3UTR respectively.

[0451] VGAM35 RNA, herein designated VGAM RNA, binds complementarily to one or more host target binding sites located in untranslated regions of VGAM35 host target RNA, herein designated VGAM HOST TARGET RNA. This complementary binding is due to the fact that the nucleotide sequence of VGAM35 RNA, herein designated VGAM RNA, is an accurate or a partial inversed-reversed sequence of the nucleotide sequence of each of the host target binding sites. As an illustration, FIG. 1 shows 3 such host target binding sites, designated BINDING SITE I, BINDING SITE II and BINDING SITE III respectively. It is appreciated that the number of host target binding sites shown in FIG. 1 is meant as an illustration only, and is not meant to be limiting VGAM35 RNA, herein designated VGAM RNA, may have a different number of host target binding sites in untranslated regions of a VGAM35 host target RNA, herein designated VGAM HOST TARGET RNA. It is further appreciated that while FIG. 1 depicts host target binding sites in the 3UTR region, this is meant as an example only these host target binding sites may be located in the 3UTR region, the 5UTR region, or in both 3UTR and 5UTR regions.

[0452] The complementary binding of VGAM35 RNA, herein designated VGAM RNA, to host target binding sites on VGAM35 host target RNA, herein designated VGAM HOST TARGET RNA, such as BINDING SITE I, BINDING SITE II and BINDING SITE III, inhibits translation of VGAM35 host target RNA, herein designated VGAM HOST TARGET RNA, into VGAM35 host target protein, herein designated VGAM HOST TARGET PROTEIN. VGAM host target protein is therefore outlined by a broken line.

[0453] It is appreciated that VGAM35 host target gene, herein designated VGAM HOST TARGET GENE, in fact represents a plurality of VGAM35 host target genes. The mRNA of each one of this plurality of VGAM35 host target genes comprises one or more host target binding sites, each having a nucleotide sequence which is at least partly complementary to VGAM35 RNA, herein designated VGAM RNA, and which when bound by VGAM35 RNA, herein designated VGAM RNA, causes inhibition of translation of respective one or more VGAM35 host target proteins.

[0454] It is further appreciated by one skilled in the art that the mode of translational inhibition illustrated by FIG. 1 with specific reference to translational inhibition exerted by VGAM35 gene, herein designated VGAM GENE, on one or more VGAM35 host target gene, herein designated VGAM HOST TARGET GENE, is in fact common to other known non-viral miRNA genes. As mentioned hereinabove with reference to the background section, although a specific complementary binding site has been demonstrated only for some of the known miRNA genes (primarily Lin-4 and Let-7), all other recently discovered miRNA genes are also believed by those skilled in the art to modulate expression of other genes by complementary binding, although specific complementary binding sites of these other miRNA genes have not yet been found (Ruvkun G., Perspective: Glimpses of a tiny RNA world, Science 294, 779 (2001)).

[0455] It is yet further appreciated that a function of VGAM35 is inhibition of expression of host target genes, as part of a novel viral mechanism of attacking a host. Accordingly, utilities of VGAM35 include diagnosis, prevention and treatment of viral infection by Vaccinia virus. Specific functions, and accordingly utilities, of VGAM35 correlate with, and may be deduced from, the identity of the host target genes which VGAM35 binds and inhibits, and the function of these host target genes, as elaborated hereinbelow.

[0456] Nucleotide sequences of the VGAM35 precursor RNA, herein designated VGAM PRECURSOR RNA, and of the diced VGAM35 RNA, herein designated VGAM RNA, and a schematic representation of the secondary folding of VGAM35 folded precursor RNA, herein designated VGAM FOLDED PRECURSOR RNA, of VGAM35 are further described hereinbelow with reference to Table 1.

[0457] Nucleotide sequences of host target binding sites, such as BINDING SITE-I, BINDING SITE-II and BINDING SITE-III of FIG. 1, found on, and schematic representation of the complementarity of each of these host target binding sites to VGAM35 RNA, herein designated VGAM RNA, are described hereinbelow with reference to Table 2.

[0458] FIG. 1 further provides a conceptual description of another novel bioinformatically detected viral gene of the present invention, referred to here as Viral Genomic Address Messenger 36 (VGAM36) viral gene, which modulates expression of respective host target genes thereof, the function and utility of which host target genes is known in the art.

[0459] VGAM36 is a novel bioinformatically detected regulatory, non protein coding, viral micro RNA (miRNA) gene. The method by which VGAM36 was detected is described hereinabove with reference to FIGS. 2-8.

[0460] VGAM36 gene, herein designated VGAM GENE, is a viral gene contained in the genome of Vaccinia virus. VGAM36 host target gene, herein designated VGAM HOST TARGET GENE, is a human gene contained in the human genome.

[0461] VGAM36 gene, herein designated VGAM GENE, encodes a VGAM36 precursor RNA, herein designated VGAM PRECURSOR RNA. Similar to other miRNA genes, and unlike most ordinary genes, VGAM36 precursor RNA, herein designated VGAM PRECURSOR RNA, does not encode a protein. A nucleotide sequence identical or highly similar to the nucleotide sequence of VGAM36 precursor RNA is designated SEQ ID:22, and is provided hereinbelow with reference to the sequence listing part. Nucleotide sequence SEQ ID:22 is located at position 3549 relative to the genome of Vaccinia virus.

[0462] VGAM36 precursor RNA, herein designated VGAM PRECURSOR RNA, folds onto itself, forming VGAM36 folded precursor RNA, herein designated VGAM FOLDED PRECURSOR RNA, which has a two-dimensional hairpin structure. As is well known in the art, this hairpin structure, is typical of RNA encoded by miRNA genes, and is due to the fact that the nucleotide sequence of the first half of the RNA encoded by a miRNA gene is an accurate or partial inversed-reversed sequence of the nucleotide sequence of the second half thereof.

[0463] An enzyme complex designated DICER COMPLEX, dices the VGAM36 folded precursor RNA, herein designated VGAM FOLDED PRECURSOR RNA, into VGAM36 RNA, herein designated VGAM RNA, a single stranded ˜22 nt long RNA segment. As is known in the art, dicing of a hairpin structured RNA precursor product into a short ˜22 nt RNA segment is catalyzed by an enzyme complex comprising an enzyme called Dicer together with other necessary proteins. A probable (over 74%) nucleotide sequence of VGAM36 RNA is designated SEQ ID:371, and is provided hereinbelow with reference to the sequence listing part.

[0464] VGAM36 host target gene, herein designated VGAM HOST TARGET GENE, encodes a corresponding messenger RNA, VGAM36 host target RNA, herein designated VGAM HOST TARGET RNA. VGAM36 host target RNA, herein designated VGAM HOST TARGET RNA, comprises three regions, as is typical of mRNA of a protein coding gene: a 5 untranslated region, a protein coding region and a 3 untranslated region, designated 5UTR, PROTEIN CODING and 3UTR respectively.

[0465] VGAM36 RNA, herein designated VGAM RNA, binds complementarily to one or more host target binding sites located in untranslated regions of VGAM36 host target RNA, herein designated VGAM HOST TARGET RNA. This complementary binding is due to the fact that the nucleotide sequence of VGAM36 RNA, herein designated VGAM RNA, is an accurate or a partial inversed-reversed sequence of the nucleotide sequence of each of the host target binding sites. As an illustration, FIG. 1 shows 3 such host target binding sites, designated BINDING SITE I, BINDING SITE II and BINDING SITE III respectively. It is appreciated that the number of host target binding sites shown in FIG. 1 is meant as an illustration only, and is not meant to be limiting VGAM36 RNA, herein designated VGAM RNA, may have a different number of host target binding sites in untranslated regions of a VGAM36 host target RNA, herein designated VGAM HOST TARGET RNA. It is further appreciated that while FIG. 1 depicts host target binding sites in the 3UTR region, this is meant as an example only these host target binding sites may be located in the 3UTR region, the 5UTR region, or in both 3UTR and 5UTR regions.

[0466] The complementary binding of VGAM36 RNA, herein designated VGAM RNA, to host target binding sites on VGAM36 host target RNA, herein designated VGAM HOST TARGET RNA, such as BINDING SITE I, BINDING SITE II and BINDING SITE III, inhibits translation of VGAM36 host target RNA, herein designated VGAM HOST TARGET RNA, into VGAM36 host target protein, herein designated VGAM HOST TARGET PROTEIN. VGAM host target protein is therefore outlined by a broken line.

[0467] It is appreciated that VGAM36 host target gene, herein designated VGAM HOST TARGET GENE, in fact represents a plurality of VGAM36 host target genes. The mRNA of each one of this plurality of VGAM36 host target genes comprises one or more host target binding sites, each having a nucleotide sequence which is at least partly complementary to VGAM36 RNA, herein designated VGAM RNA, and which when bound by VGAM36 RNA, herein designated VGAM RNA, causes inhibition of translation of respective one or more VGAM36 host target proteins.

[0468] It is further appreciated by one skilled in the art that the mode of translational inhibition illustrated by FIG. 1 with specific reference to translational inhibition exerted by VGAM36 gene, herein designated VGAM GENE, on one or more VGAM36 host target gene, herein designated VGAM HOST TARGET GENE, is in fact common to other known non-viral miRNA genes. As mentioned hereinabove with reference to the background section, although a specific complementary binding site has been demonstrated only for some of the known miRNA genes (primarily Lin-4 and Let-7), all other recently discovered miRNA genes are also believed by those skilled in the art to modulate expression of other genes by complementary binding, although specific complementary binding sites of these other miRNA genes have not yet been found (Ruvkun G., Perspective: Glimpses of a tiny RNA world, Science 294, 779 (2001)).

[0469] It is yet further appreciated that a function of VGAM36 is inhibition of expression of host target genes, as part of a novel viral mechanism of attacking a host. Accordingly, utilities of VGAM36 include diagnosis, prevention and treatment of viral infection by Vaccinia virus. Specific functions, and accordingly utilities, of VGAM36 correlate with, and may be deduced from, the identity of the host target genes which VGAM36 binds and inhibits, and the function of these host target genes, as elaborated hereinbelow.

[0470] Nucleotide sequences of the VGAM36 precursor RNA, herein designated VGAM PRECURSOR RNA, and of the diced VGAM36 RNA, herein designated VGAM RNA, and a schematic representation of the secondary folding of VGAM36 folded precursor RNA, herein designated VGAM FOLDED PRECURSOR RNA, of VGAM36 are further described hereinbelow with reference to Table 1.

[0471] Nucleotide sequences of host target binding sites, such as BINDING SITE-I, BINDING SITE-II and BINDING SITE-III of FIG. 1, found on, and schematic representation of the complementarity of each of these host target binding sites to VGAM36 RNA, herein designated VGAM RNA, are described hereinbelow with reference to Table 2.

[0472] FIG. 1 further provides a conceptual description of another novel bioinformatically detected viral gene of the present invention, referred to here as Viral Genomic Address Messenger 37 (VGAM37) viral gene, which modulates expression of respective host target genes thereof, the function and utility of which host target genes is known in the art.

[0473] VGAM37 is a novel bioinformatically detected regulatory, non protein coding, viral micro RNA (miRNA) gene. The method by which VGAM37 was detected is described hereinabove with reference to FIGS. 2-8.

[0474] VGAM37 gene, herein designated VGAM GENE, is a viral gene contained in the genome of Vaccinia virus. VGAM37 host target gene, herein designated VGAM HOST TARGET GENE, is a human gene contained in the human genome.

[0475] VGAM37 gene, herein designated VGAM GENE, encodes a VGAM37 precursor RNA, herein designated VGAM PRECURSOR RNA. Similar to other miRNA genes, and unlike most ordinary genes, VGAM37 precursor RNA, herein designated VGAM PRECURSOR RNA, does not encode a protein. A nucleotide sequence identical or highly similar to the nucleotide sequence of VGAM37 precursor RNA is designated SEQ ID:23, and is provided hereinbelow with reference to the sequence listing part. Nucleotide sequence SEQ ID:23 is located at position 3549 relative to the genome of Vaccinia virus.

[0476] VGAM37 precursor RNA, herein designated VGAM PRECURSOR RNA, folds onto itself, forming VGAM37 folded precursor RNA, herein designated VGAM FOLDED PRECURSOR RNA, which has a two-dimensional hairpin structure. As is well known in the art, this hairpin structure, is typical of RNA encoded by miRNA genes, and is due to the fact that the nucleotide sequence of the first half of the RNA encoded by a miRNA gene is an accurate or partial inversed-reversed sequence of the nucleotide sequence of the second half thereof.

[0477] An enzyme complex designated DICER COMPLEX, dices the VGAM37 folded precursor RNA, herein designated VGAM FOLDED PRECURSOR RNA, into VGAM37 RNA, herein designated VGAM RNA, a single stranded ˜22 nt long RNA segment. As is known in the art, dicing of a hairpin structured RNA precursor product into a short ˜22 nt RNA segment is catalyzed by an enzyme complex comprising an enzyme called Dicer together with other necessary proteins. A probable (over 74%) nucleotide sequence of VGAM37 RNA is designated SEQ ID:372, and is provided hereinbelow with reference to the sequence listing part.

[0478] VGAM37 host target gene, herein designated VGAM HOST TARGET GENE, encodes a corresponding messenger RNA, VGAM37 host target RNA, herein designated VGAM HOST TARGET RNA. VGAM37 host target RNA, herein designated VGAM HOST TARGET RNA, comprises three regions, as is typical of mRNA of a protein coding gene: a 5 untranslated region, a protein coding region and a 3 untranslated region, designated 5UTR, PROTEIN CODING and 3UTR respectively.

[0479] VGAM37 RNA, herein designated VGAM RNA, binds complementarily to one or more host target binding sites located in untranslated regions of VGAM37 host target RNA, herein designated VGAM HOST TARGET RNA. This complementary binding is due to the fact that the nucleotide sequence of VGAM37 RNA, herein designated VGAM RNA, is an accurate or a partial inversed-reversed sequence of the nucleotide sequence of each of the host target binding sites. As an illustration, FIG. 1 shows 3 such host target binding sites, designated BINDING SITE I, BINDING SITE II and BINDING SITE III respectively. It is appreciated that the number of host target binding sites shown in FIG. 1 is meant as an illustration only, and is not meant to be limiting VGAM37 RNA, herein designated VGAM RNA, may have a different number of host target binding sites in untranslated regions of a VGAM37 host target RNA, herein designated VGAM HOST TARGET RNA. It is further appreciated that while FIG. 1 depicts host target binding sites in the 3UTR region, this is meant as an example only these host target binding sites may be located in the 3UTR region, the 5UTR region, or in both 3UTR and 5UTR regions.

[0480] The complementary binding of VGAM37 RNA, herein designated VGAM RNA, to host target binding sites on VGAM37 host target RNA, herein designated VGAM HOST TARGET RNA, such as BINDING SITE I, BINDING SITE II and BINDING SITE III, inhibits translation of VGAM37 host target RNA, herein designated VGAM HOST TARGET RNA, into VGAM37 host target protein, herein designated VGAM HOST TARGET PROTEIN. VGAM host target protein is therefore outlined by a broken line.

[0481] It is appreciated that VGAM37 host target gene, herein designated VGAM HOST TARGET GENE, in fact represents a plurality of VGAM37 host target genes. The mRNA of each one of this plurality of VGAM37 host target genes comprises one or more host target binding sites, each having a nucleotide sequence which is at least partly complementary to VGAM37 RNA, herein designated VGAM RNA, and which when bound by VGAM37 RNA, herein designated VGAM RNA, causes inhibition of translation of respective one or more VGAM37 host target proteins.

[0482] It is further appreciated by one skilled in the art that the mode of translational inhibition illustrated by FIG. 1 with specific reference to translational inhibition exerted by VGAM37 gene, herein designated VGAM GENE, on one or more VGAM37 host target gene, herein designated VGAM HOST TARGET GENE, is in fact common to other known non-viral miRNA genes. As mentioned hereinabove with reference to the background section, although a specific complementary binding site has been demonstrated only for some of the known miRNA genes (primarily Lin-4 and Let-7), all other recently discovered miRNA genes are also believed by those skilled in the art to modulate expression of other genes by complementary binding, although specific complementary binding sites of these other miRNA genes have not yet been found (Ruvkun G., Perspective: Glimpses of a tiny RNA world, Science 294, 779 (2001)).

[0483] It is yet further appreciated that a function of VGAM37 is inhibition of expression of host target genes, as part of a novel viral mechanism of attacking a host. Accordingly, utilities of VGAM37 include diagnosis, prevention and treatment of viral infection by Vaccinia virus. Specific functions, and accordingly utilities, of VGAM37 correlate with, and may be deduced from, the identity of the host target genes which VGAM37 binds and inhibits, and the function of these host target genes, as elaborated hereinbelow.

[0484] Nucleotide sequences of the VGAM37 precursor RNA, herein designated VGAM PRECURSOR RNA, and of the diced VGAM37 RNA, herein designated VGAM RNA, and a schematic representation of the secondary folding of VGAM37 folded precursor RNA, herein designated VGAM FOLDED PRECURSOR RNA, of VGAM37 are further described hereinbelow with reference to Table 1.

[0485] Nucleotide sequences of host target binding sites, such as BINDING SITE-I, BINDING SITE-II and BINDING SITE-III of FIG. 1, found on, and schematic representation of the complementarity of each of these host target binding sites to VGAM37 RNA, herein designated VGAM RNA, are described hereinbelow with reference to Table 2.

[0486] FIG. 1 further provides a conceptual description of another novel bioinformatically detected viral gene of the present invention, referred to here as Viral Genomic Address Messenger 38 (VGAM38) viral gene, which modulates expression of respective host target genes thereof, the function and utility of which host target genes is known in the art.

[0487] VGAM38 is a novel bioinformatically detected regulatory, non protein coding, viral micro RNA (miRNA) gene. The method by which VGAM38 was detected is described hereinabove with reference to FIGS. 2-8.

[0488] VGAM38 gene, herein designated VGAM GENE, is a viral gene contained in the genome of Vaccinia virus. VGAM38 host target gene, herein designated VGAM HOST TARGET GENE, is a human gene contained in the human genome.

[0489] VGAM38 gene, herein designated VGAM GENE, encodes a VGAM38 precursor RNA, herein designated VGAM PRECURSOR RNA. Similar to other miRNA genes, and unlike most ordinary genes, VGAM38 precursor RNA, herein designated VGAM PRECURSOR RNA, does not encode a protein. A nucleotide sequence identical or highly similar to the nucleotide sequence of VGAM38 precursor RNA is designated SEQ ID:24, and is provided hereinbelow with reference to the sequence listing part. Nucleotide sequence SEQ ID:24 is located at position 2981 relative to the genome of Vaccinia virus.

[0490] VGAM38 precursor RNA, herein designated VGAM PRECURSOR RNA, folds onto itself, forming VGAM38 folded precursor RNA, herein designated VGAM FOLDED PRECURSOR RNA, which has a two-dimensional hairpin structure. As is well known in the art, this hairpin structure, is typical of RNA encoded by miRNA genes, and is due to the fact that the nucleotide sequence of the first half of the RNA encoded by a miRNA gene is an accurate or partial inversed-reversed sequence of the nucleotide sequence of the second half thereof.

[0491] An enzyme complex designated DICER COMPLEX, dices the VGAM38 folded precursor RNA, herein designated VGAM FOLDED PRECURSOR RNA, into VGAM38 RNA, herein designated VGAM RNA, a single stranded ˜22 nt long RNA segment. As is known in the art, dicing of a hairpin structured RNA precursor product into a short ˜22 nt RNA segment is catalyzed by an enzyme complex comprising an enzyme called Dicer together with other necessary proteins. A probable (over 79%) nucleotide sequence of VGAM38 RNA is designated SEQ ID:373, and is provided hereinbelow with reference to the sequence listing part.

[0492] VGAM38 host target gene, herein designated VGAM HOST TARGET GENE, encodes a corresponding messenger RNA, VGAM38 host target RNA, herein designated VGAM HOST TARGET RNA. VGAM38 host target RNA, herein designated VGAM HOST TARGET RNA, comprises three regions, as is typical of mRNA of a protein coding gene: a 5 untranslated region, a protein coding region and a 3 untranslated region, designated 5UTR, PROTEIN CODING and 3UTR respectively.

[0493] VGAM38 RNA, herein designated VGAM RNA, binds complementarily to one or more host target binding sites located in untranslated regions of VGAM38 host target RNA, herein designated VGAM HOST TARGET RNA. This complementary binding is due to the fact that the nucleotide sequence of VGAM38 RNA, herein designated VGAM RNA, is an accurate or a partial inversed-reversed sequence of the nucleotide sequence of each of the host target binding sites. As an illustration, FIG. 1 shows 3 such host target binding sites, designated BINDING SITE I, BINDING SITE II and BINDING SITE III respectively. It is appreciated that the number of host target binding sites shown in FIG. 1 is meant as an illustration only, and is not meant to be limiting VGAM38 RNA, herein designated VGAM RNA, may have a different number of host target binding sites in untranslated regions of a VGAM38 host target RNA, herein designated VGAM HOST TARGET RNA. It is further appreciated that while FIG. 1 depicts host target binding sites in the 3UTR region, this is meant as an example only these host target binding sites may be located in the 3UTR region, the 5UTR region, or in both 3UTR and 5UTR regions.

[0494] The complementary binding of VGAM38 RNA, herein designated VGAM RNA, to host target binding sites on VGAM38 host target RNA, herein designated VGAM HOST TARGET RNA, such as BINDING SITE I, BINDING SITE II and BINDING SITE III, inhibits translation of VGAM38 host target RNA, herein designated VGAM HOST TARGET RNA, into VGAM38 host target protein, herein designated VGAM HOST TARGET PROTEIN. VGAM host target protein is therefore outlined by a broken line.

[0495] It is appreciated that VGAM38 host target gene, herein designated VGAM HOST TARGET GENE, in fact represents a plurality of VGAM38 host target genes. The mRNA of each one of this plurality of VGAM38 host target genes comprises one or more host target binding sites, each having a nucleotide sequence which is at least partly complementary to VGAM38 RNA, herein designated VGAM RNA, and which when bound by VGAM38 RNA, herein designated VGAM RNA, causes inhibition of translation of respective one or more VGAM38 host target proteins.

[0496] It is further appreciated by one skilled in the art that the mode of translational inhibition illustrated by FIG. 1 with specific reference to translational inhibition exerted by VGAM38 gene, herein designated VGAM GENE, on one or more VGAM38 host target gene, herein designated VGAM HOST TARGET GENE, is in fact common to other known non-viral miRNA genes. As mentioned hereinabove with reference to the background section, although a specific complementary binding site has been demonstrated only for some of the known miRNA genes (primarily Lin-4 and Let-7), all other recently discovered miRNA genes are also believed by those skilled in the art to modulate expression of other genes by complementary binding, although specific complementary binding sites of these other miRNA genes have not yet been found (Ruvkun G., Perspective: Glimpses of a tiny RNA world, Science 294, 779 (2001)).

[0497] It is yet further appreciated that a function of VGAM38 is inhibition of expression of host target genes, as part of a novel viral mechanism of attacking a host. Accordingly, utilities of VGAM38 include diagnosis, prevention and treatment of viral infection by Vaccinia virus. Specific functions, and accordingly utilities, of VGAM38 correlate with, and may be deduced from, the identity of the host target genes which VGAM38 binds and inhibits, and the function of these host target genes, as elaborated hereinbelow.

[0498] Nucleotide sequences of the VGAM38 precursor RNA, herein designated VGAM PRECURSOR RNA, and of the diced VGAM38 RNA, herein designated VGAM RNA, and a schematic representation of the secondary folding of VGAM38 folded precursor RNA, herein designated VGAM FOLDED PRECURSOR RNA, of VGAM38 are further described hereinbelow with reference to Table 1.

[0499] Nucleotide sequences of host target binding sites, such as BINDING SITE-I, BINDING SITE-II and BINDING SITE-III of FIG. 1, found on, and schematic representation of the complementarity of each of these host target binding sites to VGAM38 RNA, herein designated VGAM RNA, are described hereinbelow with reference to Table 2.

[0500] FIG. 1 further provides a conceptual description of another novel bioinformatically detected viral gene of the present invention, referred to here as Viral Genomic Address Messenger 39 (VGAM39) viral gene, which modulates expression of respective host target genes thereof, the function and utility of which host target genes is known in the art.

[0501] VGAM39 is a novel bioinformatically detected regulatory, non protein coding, viral micro RNA (miRNA) gene. The method by which VGAM39 was detected is described hereinabove with reference to FIGS. 2-8.

[0502] VGAM39 gene, herein designated VGAM GENE, is a viral gene contained in the genome of Vaccinia virus. VGAM39 host target gene, herein designated VGAM HOST TARGET GENE, is a human gene contained in the human genome.

[0503] VGAM39 gene, herein designated VGAM GENE, encodes a VGAM39 precursor RNA, herein designated VGAM PRECURSOR RNA. Similar to other miRNA genes, and unlike most ordinary genes, VGAM39 precursor RNA, herein designated VGAM PRECURSOR RNA, does not encode a protein. A nucleotide sequence identical or highly similar to the nucleotide sequence of VGAM39 precursor RNA is designated SEQ ID:25, and is provided hereinbelow with reference to the sequence listing part. Nucleotide sequence SEQ ID:25 is located at position 963 relative to the genome of Vaccinia virus.

[0504] VGAM39 precursor RNA, herein designated VGAM PRECURSOR RNA, folds onto itself, forming VGAM39 folded precursor RNA, herein designated VGAM FOLDED PRECURSOR RNA, which has a two-dimensional hairpin structure. As is well known in the art, this hairpin structure, is typical of RNA encoded by miRNA genes, and is due to the fact that the nucleotide sequence of the first half of the RNA encoded by a miRNA gene is an accurate or partial inversed-reversed sequence of the nucleotide sequence of the second half thereof.

[0505] An enzyme complex designated DICER COMPLEX, dices the VGAM39 folded precursor RNA, herein designated VGAM FOLDED PRECURSOR RNA, into VGAM39 RNA, herein designated VGAM RNA, a single stranded ˜22 nt long RNA segment. As is known in the art, dicing of a hairpin structured RNA precursor product into a short ˜22 nt RNA segment is catalyzed by an enzyme complex comprising an enzyme called Dicer together with other necessary proteins. A probable (over 92%) nucleotide sequence of VGAM39 RNA is designated SEQ ID:374, and is provided hereinbelow with reference to the sequence listing part.

[0506] VGAM39 host target gene, herein designated VGAM HOST TARGET GENE, encodes a corresponding messenger RNA, VGAM39 host target RNA, herein designated VGAM HOST TARGET RNA. VGAM39 host target RNA, herein designated VGAM HOST TARGET RNA, comprises three regions, as is typical of mRNA of a protein coding gene: a 5 untranslated region, a protein coding region and a 3 untranslated region, designated 5UTR, PROTEIN CODING and 3UTR respectively.

[0507] VGAM39 RNA, herein designated VGAM RNA, binds complementarily to one or more host target binding sites located in untranslated regions of VGAM39 host target RNA, herein designated VGAM HOST TARGET RNA. This complementary binding is due to the fact that the nucleotide sequence of VGAM39 RNA, herein designated VGAM RNA, is an accurate or a partial inversed-reversed sequence of the nucleotide sequence of each of the host target binding sites. As an illustration, FIG. 1 shows 3 such host target binding sites, designated BINDING SITE I, BINDING SITE II and BINDING SITE III respectively. It is appreciated that the number of host target binding sites shown in FIG. 1 is meant as an illustration only, and is not meant to be limiting VGAM39 RNA, herein designated VGAM RNA, may have a different number of host target binding sites in untranslated regions of a VGAM39 host target RNA, herein designated VGAM HOST TARGET RNA. It is further appreciated that while FIG. 1 depicts host target binding sites in the 3UTR region, this is meant as an example only these host target binding sites may be located in the 3UTR region, the 5UTR region, or in both 3UTR and 5UTR regions.

[0508] The complementary binding of VGAM39 RNA, herein designated VGAM RNA, to host target binding sites on VGAM39 host target RNA, herein designated VGAM HOST TARGET RNA, such as BINDING SITE I, BINDING SITE II and BINDING SITE III, inhibits translation of VGAM39 host target RNA, herein designated VGAM HOST TARGET RNA, into VGAM39 host target protein, herein designated VGAM HOST TARGET PROTEIN. VGAM host target protein is therefore outlined by a broken line.

[0509] It is appreciated that VGAM39 host target gene, herein designated VGAM HOST TARGET GENE, in fact represents a plurality of VGAM39 host target genes. The mRNA of each one of this plurality of VGAM39 host target genes comprises one or more host target binding sites, each having a nucleotide sequence which is at least partly complementary to VGAM39 RNA, herein designated VGAM RNA, and which when bound by VGAM39 RNA, herein designated VGAM RNA, causes inhibition of translation of respective one or more VGAM39 host target proteins.

[0510] It is further appreciated by one skilled in the art that the mode of translational inhibition illustrated by FIG. 1 with specific reference to translational inhibition exerted by VGAM39 gene, herein designated VGAM GENE, on one or more VGAM39 host target gene, herein designated VGAM HOST TARGET GENE, is in fact common to other known non-viral miRNA genes. As mentioned hereinabove with reference to the background section, although a specific complementary binding site has been demonstrated only for some of the known miRNA genes (primarily Lin-4 and Let-7), all other recently discovered miRNA genes are also believed by those skilled in the art to modulate expression of other genes by complementary binding, although specific complementary binding sites of these other miRNA genes have not yet been found (Ruvkun G., Perspective: Glimpses of a tiny RNA world, Science 294, 779 (2001)).

[0511] It is yet further appreciated that a function of VGAM39 is inhibition of expression of host target genes, as part of a novel viral mechanism of attacking a host. Accordingly, utilities of VGAM39 include diagnosis, prevention and treatment of viral infection by Vaccinia virus. Specific functions, and accordingly utilities, of VGAM39 correlate with, and may be deduced from, the identity of the host target genes which VGAM39 binds and inhibits, and the function of these host target genes, as elaborated hereinbelow.

[0512] Nucleotide sequences of the VGAM39 precursor RNA, herein designated VGAM PRECURSOR RNA, and of the diced VGAM39 RNA, herein designated VGAM RNA, and a schematic representation of the secondary folding of VGAM39 folded precursor RNA, herein designated VGAM FOLDED PRECURSOR RNA, of VGAM39 are further described hereinbelow with reference to Table 1.

[0513] Nucleotide sequences of host target binding sites, such as BINDING SITE-I, BINDING SITE-II and BINDING SITE-III of FIG. 1, found on, and schematic representation of the complementarity of each of these host target binding sites to VGAM39 RNA, herein designated VGAM RNA, are described hereinbelow with reference to Table 2.

[0514] FIG. 1 further provides a conceptual description of another novel bioinformatically detected viral gene of the present invention, referred to here as Viral Genomic Address Messenger 40 (VGAM40) viral gene, which modulates expression of respective host target genes thereof, the function and utility of which host target genes is known in the art.

[0515] VGAM40 is a novel bioinformatically detected regulatory, non protein coding, viral micro RNA (miRNA) gene. The method by which VGAM40 was detected is described hereinabove with reference to FIGS. 2-8.

[0516] VGAM40 gene, herein designated VGAM GENE, is a viral gene contained in the genome of Vaccinia virus. VGAM40 host target gene, herein designated VGAM HOST TARGET GENE, is a human gene contained in the human genome.

[0517] VGAM40 gene, herein designated VGAM GENE, encodes a VGAM40 precursor RNA, herein designated VGAM PRECURSOR RNA. Similar to other miRNA genes, and unlike most ordinary genes, VGAM40 precursor RNA, herein designated VGAM PRECURSOR RNA, does not encode a protein. A nucleotide sequence identical or highly similar to the nucleotide sequence of VGAM40 precursor RNA is designated SEQ ID:26, and is provided hereinbelow with reference to the sequence listing part. Nucleotide sequence SEQ ID:26 is located at position 963 relative to the genome of Vaccinia virus.

[0518] VGAM40 precursor RNA, herein designated VGAM PRECURSOR RNA, folds onto itself, forming VGAM40 folded precursor RNA, herein designated VGAM FOLDED PRECURSOR RNA, which has a two-dimensional hairpin structure. As is well known in the art, this hairpin structure, is typical of RNA encoded by miRNA genes, and is due to the fact that the nucleotide sequence of the first half of the RNA encoded by a miRNA gene is an accurate or partial inversed-reversed sequence of the nucleotide sequence of the second half thereof.

[0519] An enzyme complex designated DICER COMPLEX, dices the VGAM40 folded precursor RNA, herein designated VGAM FOLDED PRECURSOR RNA, into VGAM40 RNA, herein designated VGAM RNA, a single stranded ˜22 nt long RNA segment. As is known in the art, dicing of a hairpin structured RNA precursor product into a short ˜22 nt RNA segment is catalyzed by an enzyme complex comprising an enzyme called Dicer together with other necessary proteins. A probable (over 92%) nucleotide sequence of VGAM40 RNA is designated SEQ ID:375, and is provided hereinbelow with reference to the sequence listing part.

[0520] VGAM40 host target gene, herein designated VGAM HOST TARGET GENE, encodes a corresponding messenger RNA, VGAM40 host target RNA, herein designated VGAM HOST TARGET RNA. VGAM40 host target RNA, herein designated VGAM HOST TARGET RNA, comprises three regions, as is typical of mRNA of a protein coding gene: a 5 untranslated region, a protein coding region and a 3 untranslated region, designated 5UTR, PROTEIN CODING and 3UTR respectively.

[0521] VGAM40 RNA, herein designated VGAM RNA, binds complementarily to one or more host target binding sites located in untranslated regions of VGAM40 host target RNA, herein designated VGAM HOST TARGET RNA. This complementary binding is due to the fact that the nucleotide sequence of VGAM40 RNA, herein designated VGAM RNA, is an accurate or a partial inversed-reversed sequence of the nucleotide sequence of each of the host target binding sites. As an illustration, FIG. 1 shows 3 such host target binding sites, designated BINDING SITE I, BINDING SITE II and BINDING SITE III respectively. It is appreciated that the number of host target binding sites shown in FIG. 1 is meant as an illustration only, and is not meant to be limiting VGAM40 RNA, herein designated VGAM RNA, may have a different number of host target binding sites in untranslated regions of a VGAM40 host target RNA, herein designated VGAM HOST TARGET RNA. It is further appreciated that while FIG. 1 depicts host target binding sites in the 3UTR region, this is meant as an example only these host target binding sites may be located in the 3UTR region, the 5UTR region, or in both 3UTR and 5UTR regions.

[0522] The complementary binding of VGAM40 RNA, herein designated VGAM RNA, to host target binding sites on VGAM40 host target RNA, herein designated VGAM HOST TARGET RNA, such as BINDING SITE I, BINDING SITE II and BINDING SITE III, inhibits translation of VGAM40 host target RNA, herein designated VGAM HOST TARGET RNA, into VGAM40 host target protein, herein designated VGAM HOST TARGET PROTEIN. VGAM host target protein is therefore outlined by a broken line.

[0523] It is appreciated that VGAM40 host target gene, herein designated VGAM HOST TARGET GENE, in fact represents a plurality of VGAM40 host target genes. The mRNA of each one of this plurality of VGAM40 host target genes comprises one or more host target binding sites, each having a nucleotide sequence which is at least partly complementary to VGAM40 RNA, herein designated VGAM RNA, and which when bound by VGAM40 RNA, herein designated VGAM RNA, causes inhibition of translation of respective one or more VGAM40 host target proteins.

[0524] It is further appreciated by one skilled in the art that the mode of translational inhibition illustrated by FIG. 1 with specific reference to translational inhibition exerted by VGAM40 gene, herein designated VGAM GENE, on one or more VGAM40 host target gene, herein designated VGAM HOST TARGET GENE, is in fact common to other known non-viral miRNA genes. As mentioned hereinabove with reference to the background section, although a specific complementary binding site has been demonstrated only for some of the known miRNA genes (primarily Lin-4 and Let-7), all other recently discovered miRNA genes are also believed by those skilled in the art to modulate expression of other genes by complementary binding, although specific complementary binding sites of these other miRNA genes have not yet been found (Ruvkun G., Perspective: Glimpses of a tiny RNA world, Science 294, 779 (2001)).

[0525] It is yet further appreciated that a function of VGAM40 is inhibition of expression of host target genes, as part of a novel viral mechanism of attacking a host. Accordingly, utilities of VGAM40 include diagnosis, prevention and treatment of viral infection by Vaccinia virus. Specific functions, and accordingly utilities, of VGAM40 correlate with, and may be deduced from, the identity of the host target genes which VGAM40 binds and inhibits, and the function of these host target genes, as elaborated hereinbelow.

[0526] Nucleotide sequences of the VGAM40 precursor RNA, herein designated VGAM PRECURSOR RNA, and of the diced VGAM40 RNA, herein designated VGAM RNA, and a schematic representation of the secondary folding of VGAM40 folded precursor RNA, herein designated VGAM FOLDED PRECURSOR RNA, of VGAM40 are further described hereinbelow with reference to Table 1.

[0527] Nucleotide sequences of host target binding sites, such as BINDING SITE-I, BINDING SITE-II and BINDING SITE-III of FIG. 1, found on, and schematic representation of the complementarity of each of these host target binding sites to VGAM40 RNA, herein designated VGAM RNA, are described hereinbelow with reference to Table 2.

[0528] FIG. 1 further provides a conceptual description of another novel bioinformatically detected viral gene of the present invention, referred to here as Viral Genomic Address Messenger 41 (VGAM41) viral gene, which modulates expression of respective host target genes thereof, the function and utility of which host target genes is known in the art.

[0529] VGAM41 is a novel bioinformatically detected regulatory, non protein coding, viral micro RNA (miRNA) gene. The method by which VGAM41 was detected is described hereinabove with reference to FIGS. 2-8.

[0530] VGAM41 gene, herein designated VGAM GENE, is a viral gene contained in the genome of Vaccinia virus. VGAM41 host target gene, herein designated VGAM HOST TARGET GENE, is a human gene contained in the human genome.

[0531] VGAM41 gene, herein designated VGAM GENE, encodes a VGAM41 precursor RNA, herein designated VGAM PRECURSOR RNA. Similar to other miRNA genes, and unlike most ordinary genes, VGAM41 precursor RNA, herein designated VGAM PRECURSOR RNA, does not encode a protein. A nucleotide sequence identical or highly similar to the nucleotide sequence of VGAM41 precursor RNA is designated SEQ ID:27, and is provided hereinbelow with reference to the sequence listing part. Nucleotide sequence SEQ ID:27 is located at position 963 relative to the genome of Vaccinia virus.

[0532] VGAM41 precursor RNA, herein designated VGAM PRECURSOR RNA, folds onto itself, forming VGAM41 folded precursor RNA, herein designated VGAM FOLDED PRECURSOR RNA, which has a two-dimensional hairpin structure. As is well known in the art, this hairpin structure, is typical of RNA encoded by miRNA genes, and is due to the fact that the nucleotide sequence of the first half of the RNA encoded by a miRNA gene is an accurate or partial inversed-reversed sequence of the nucleotide sequence of the second half thereof.

[0533] An enzyme complex designated DICER COMPLEX, dices the VGAM41 folded precursor RNA, herein designated VGAM FOLDED PRECURSOR RNA, into VGAM41 RNA, herein designated VGAM RNA, a single stranded ˜22 nt long RNA segment. As is known in the art, dicing of a hairpin structured RNA precursor product into a short ˜22 nt RNA segment is catalyzed by an enzyme complex comprising an enzyme called Dicer together with other necessary proteins. A probable (over 92%) nucleotide sequence of VGAM41 RNA is designated SEQ ID:376, and is provided hereinbelow with reference to the sequence listing part.

[0534] VGAM41 host target gene, herein designated VGAM HOST TARGET GENE, encodes a corresponding messenger RNA, VGAM41 host target RNA, herein designated VGAM HOST TARGET RNA. VGAM41 host target RNA, herein designated VGAM HOST TARGET RNA, comprises three regions, as is typical of mRNA of a protein coding gene: a 5 untranslated region, a protein coding region and a 3 untranslated region, designated 5UTR, PROTEIN CODING and 3UTR respectively.

[0535] VGAM41 RNA, herein designated VGAM RNA, binds complementarily to one or more host target binding sites located in untranslated regions of VGAM41 host target RNA, herein designated VGAM HOST TARGET RNA. This complementary binding is due to the fact that the nucleotide sequence of VGAM41 RNA, herein designated VGAM RNA, is an accurate or a partial inversed-reversed sequence of the nucleotide sequence of each of the host target binding sites. As an illustration, FIG. 1 shows 3 such host target binding sites, designated BINDING SITE I, BINDING SITE II and BINDING SITE III respectively. It is appreciated that the number of host target binding sites shown in FIG. 1 is meant as an illustration only, and is not meant to be limiting VGAM41 RNA, herein designated VGAM RNA, may have a different number of host target binding sites in untranslated regions of a VGAM41 host target RNA, herein designated VGAM HOST TARGET RNA. It is further appreciated that while FIG. 1 depicts host target binding sites in the 3UTR region, this is meant as an example only these host target binding sites may be located in the 3UTR region, the 5UTR region, or in both 3UTR and 5UTR regions.

[0536] The complementary binding of VGAM41 RNA, herein designated VGAM RNA, to host target binding sites on VGAM41 host target RNA, herein designated VGAM HOST TARGET RNA, such as BINDING SITE I, BINDING SITE II and BINDING SITE III, inhibits translation of VGAM41 host target RNA, herein designated VGAM HOST TARGET RNA, into VGAM41 host target protein, herein designated VGAM HOST TARGET PROTEIN. VGAM host target protein is therefore outlined by a broken line.

[0537] It is appreciated that VGAM41 host target gene, herein designated VGAM HOST TARGET GENE, in fact represents a plurality of VGAM41 host target genes. The mRNA of each one of this plurality of VGAM41 host target genes comprises one or more host target binding sites, each having a nucleotide sequence which is at least partly complementary to VGAM41 RNA, herein designated VGAM RNA, and which when bound by VGAM41 RNA, herein designated VGAM RNA, causes inhibition of translation of respective one or more VGAM41 host target proteins.

[0538] It is further appreciated by one skilled in the art that the mode of translational inhibition illustrated by FIG. 1 with specific reference to translational inhibition exerted by VGAM41 gene, herein designated VGAM GENE, on one or more VGAM41 host target gene, herein designated VGAM HOST TARGET GENE, is in fact common to other known non-viral miRNA genes. As mentioned hereinabove with reference to the background section, although a specific complementary binding site has been demonstrated only for some of the known miRNA genes (primarily Lin-4 and Let-7), all other recently discovered miRNA genes are also believed by those skilled in the art to modulate expression of other genes by complementary binding, although specific complementary binding sites of these other miRNA genes have not yet been found (Ruvkun G., Perspective: Glimpses of a tiny RNA world, Science 294, 779 (2001)).

[0539] It is yet further appreciated that a function of VGAM41 is inhibition of expression of host target genes, as part of a novel viral mechanism of attacking a host. Accordingly, utilities of VGAM41 include diagnosis, prevention and treatment of viral infection by Vaccinia virus. Specific functions, and accordingly utilities, of VGAM41 correlate with, and may be deduced from, the identity of the host target genes which VGAM41 binds and inhibits, and the function of these host target genes, as elaborated hereinbelow.

[0540] Nucleotide sequences of the VGAM41 precursor RNA, herein designated VGAM PRECURSOR RNA, and of the diced VGAM41 RNA, herein designated VGAM RNA, and a schematic representation of the secondary folding of VGAM41 folded precursor RNA, herein designated VGAM FOLDED PRECURSOR RNA, of VGAM41 are further described hereinbelow with reference to Table 1.

[0541] Nucleotide sequences of host target binding sites, such as BINDING SITE-I, BINDING SITE-II and BINDING SITE-III of FIG. 1, found on, and schematic representation of the complementarity of each of these host target binding sites to VGAM41 RNA, herein designated VGAM RNA, are described hereinbelow with reference to Table 2.

[0542] FIG. 1 further provides a conceptual description of another novel bioinformatically detected viral gene of the present invention, referred to here as Viral Genomic Address Messenger 42 (VGAM42) viral gene, which modulates expression of respective host target genes thereof, the function and utility of which host target genes is known in the art.

[0543] VGAM42 is a novel bioinformatically detected regulatory, non protein coding, viral micro RNA (miRNA) gene. The method by which VGAM42 was detected is described hereinabove with reference to FIGS. 2-8.

[0544] VGAM42 gene, herein designated VGAM GENE, is a viral gene contained in the genome of Vaccinia virus. VGAM42 host target gene, herein designated VGAM HOST TARGET GENE, is a human gene contained in the human genome.

[0545] VGAM42 gene, herein designated VGAM GENE, encodes a VGAM42 precursor RNA, herein designated VGAM PRECURSOR RNA. Similar to other miRNA genes, and unlike most ordinary genes, VGAM42 precursor RNA, herein designated VGAM PRECURSOR RNA, does not encode a protein. A nucleotide sequence identical or highly similar to the nucleotide sequence of VGAM42 precursor RNA is designated SEQ ID:28, and is provided hereinbelow with reference to the sequence listing part. Nucleotide sequence SEQ ID:28 is located at position 963 relative to the genome of Vaccinia virus.

[0546] VGAM42 precursor RNA, herein designated VGAM PRECURSOR RNA, folds onto itself, forming VGAM42 folded precursor RNA, herein designated VGAM FOLDED PRECURSOR RNA, which has a two-dimensional hairpin structure. As is well known in the art, this hairpin structure, is typical of RNA encoded by miRNA genes, and is due to the fact that the nucleotide sequence of the first half of the RNA encoded by a miRNA gene is an accurate or partial inversed-reversed sequence of the nucleotide sequence of the second half thereof.

[0547] An enzyme complex designated DICER COMPLEX, dices the VGAM42 folded precursor RNA, herein designated VGAM FOLDED PRECURSOR RNA, into VGAM42 RNA, herein designated VGAM RNA, a single stranded ˜22 nt long RNA segment. As is known in the art, dicing of a hairpin structured RNA precursor product into a short ˜22 nt RNA segment is catalyzed by an enzyme complex comprising an enzyme called Dicer together with other necessary proteins. A probable (over 92%) nucleotide sequence of VGAM42 RNA is designated SEQ ID:377, and is provided hereinbelow with reference to the sequence listing part.

[0548] VGAM42 host target gene, herein designated VGAM HOST TARGET GENE, encodes a corresponding messenger RNA, VGAM42 host target RNA, herein designated VGAM HOST TARGET RNA. VGAM42 host target RNA, herein designated VGAM HOST TARGET RNA, comprises three regions, as is typical of mRNA of a protein coding gene: a 5 untranslated region, a protein coding region and a 3 untranslated region, designated 5UTR, PROTEIN CODING and 3UTR respectively.

[0549] VGAM42 RNA, herein designated VGAM RNA, binds complementarily to one or more host target binding sites located in untranslated regions of VGAM42 host target RNA, herein designated VGAM HOST TARGET RNA. This complementary binding is due to the fact that the nucleotide sequence of VGAM42 RNA, herein designated VGAM RNA, is an accurate or a partial inversed-reversed sequence of the nucleotide sequence of each of the host target binding sites. As an illustration, FIG. 1 shows 3 such host target binding sites, designated BINDING SITE I, BINDING SITE II and BINDING SITE III respectively. It is appreciated that the number of host target binding sites shown in FIG. 1 is meant as an illustration only, and is not meant to be limiting VGAM42 RNA, herein designated VGAM RNA, may have a different number of host target binding sites in untranslated regions of a VGAM42 host target RNA, herein designated VGAM HOST TARGET RNA. It is further appreciated that while FIG. 1 depicts host target binding sites in the 3UTR region, this is meant as an example only these host target binding sites may be located in the 3UTR region, the 5UTR region, or in both 3UTR and 5UTR regions.

[0550] The complementary binding of VGAM42 RNA, herein designated VGAM RNA, to host target binding sites on VGAM42 host target RNA, herein designated VGAM HOST TARGET RNA, such as BINDING SITE I, BINDING SITE II and BINDING SITE III, inhibits translation of VGAM42 host target RNA, herein designated VGAM HOST TARGET RNA, into VGAM42 host target protein, herein designated VGAM HOST TARGET PROTEIN. VGAM host target protein is therefore outlined by a broken line.

[0551] It is appreciated that VGAM42 host target gene, herein designated VGAM HOST TARGET GENE, in fact represents a plurality of VGAM42 host target genes. The mRNA of each one of this plurality of VGAM42 host target genes comprises one or more host target binding sites, each having a nucleotide sequence which is at least partly complementary to VGAM42 RNA, herein designated VGAM RNA, and which when bound by VGAM42 RNA, herein designated VGAM RNA, causes inhibition of translation of respective one or more VGAM42 host target proteins.

[0552] It is further appreciated by one skilled in the art that the mode of translational inhibition illustrated by FIG. 1 with specific reference to translational inhibition exerted by VGAM42 gene, herein designated VGAM GENE, on one or more VGAM42 host target gene, herein designated VGAM HOST TARGET GENE, is in fact common to other known non-viral miRNA genes. As mentioned hereinabove with reference to the background section, although a specific complementary binding site has been demonstrated only for some of the known miRNA genes (primarily Lin-4 and Let-7), all other recently discovered miRNA genes are also believed by those skilled in the art to modulate expression of other genes by complementary binding, although specific complementary binding sites of these other miRNA genes have not yet been found (Ruvkun G., Perspective: Glimpses of a tiny RNA world, Science 294, 779 (2001)).

[0553] It is yet further appreciated that a function of VGAM42 is inhibition of expression of host target genes, as part of a novel viral mechanism of attacking a host. Accordingly, utilities of VGAM42 include diagnosis, prevention and treatment of viral infection by Vaccinia virus. Specific functions, and accordingly utilities, of VGAM42 correlate with, and may be deduced from, the identity of the host target genes which VGAM42 binds and inhibits, and the function of these host target genes, as elaborated hereinbelow.

[0554] Nucleotide sequences of the VGAM42 precursor RNA, herein designated VGAM PRECURSOR RNA, and of the diced VGAM42 RNA, herein designated VGAM RNA, and a schematic representation of the secondary folding of VGAM42 folded precursor RNA, herein designated VGAM FOLDED PRECURSOR RNA, of VGAM42 are further described hereinbelow with reference to Table 1.

[0555] Nucleotide sequences of host target binding sites, such as BINDING SITE-I, BINDING SITE-II and BINDING SITE-III of FIG. 1, found on, and schematic representation of the complementarity of each of these host target binding sites to VGAM42 RNA, herein designated VGAM RNA, are described hereinbelow with reference to Table 2.

[0556] FIG. 1 further provides a conceptual description of another novel bioinformatically detected viral gene of the present invention, referred to here as Viral Genomic Address Messenger 43 (VGAM43) viral gene, which modulates expression of respective host target genes thereof, the function and utility of which host target genes is known in the art.

[0557] VGAM43 is a novel bioinformatically detected regulatory, non protein coding, viral micro RNA (miRNA) gene. The method by which VGAM43 was detected is described hereinabove with reference to FIGS. 2-8.

[0558] VGAM43 gene, herein designated VGAM GENE, is a viral gene contained in the genome of Vaccinia virus. VGAM43 host target gene, herein designated VGAM HOST TARGET GENE, is a human gene contained in the human genome.

[0559] VGAM43 gene, herein designated VGAM GENE, encodes a VGAM43 precursor RNA, herein designated VGAM PRECURSOR RNA. Similar to other miRNA genes, and unlike most ordinary genes, VGAM43 precursor RNA, herein designated VGAM PRECURSOR RNA, does not encode a protein. A nucleotide sequence identical or highly similar to the nucleotide sequence of VGAM43 precursor RNA is designated SEQ ID:29, and is provided hereinbelow with reference to the sequence listing part. Nucleotide sequence SEQ ID:29 is located at position 963 relative to the genome of Vaccinia virus.

[0560] VGAM43 precursor RNA, herein designated VGAM PRECURSOR RNA, folds onto itself, forming VGAM43 folded precursor RNA, herein designated VGAM FOLDED PRECURSOR RNA, which has a two-dimensional hairpin structure. As is well known in the art, this hairpin structure, is typical of RNA encoded by miRNA genes, and is due to the fact that the nucleotide sequence of the first half of the RNA encoded by a miRNA gene is an accurate or partial inversed-reversed sequence of the nucleotide sequence of the second half thereof.

[0561] An enzyme complex designated DICER COMPLEX, dices the VGAM43 folded precursor RNA, herein designated VGAM FOLDED PRECURSOR RNA, into VGAM43 RNA, herein designated VGAM RNA, a single stranded ˜22 nt long RNA segment. As is known in the art, dicing of a hairpin structured RNA precursor product into a short ˜22 nt RNA segment is catalyzed by an enzyme complex comprising an enzyme called Dicer together with other necessary proteins. A probable (over 92%) nucleotide sequence of VGAM43 RNA is designated SEQ ID:378, and is provided hereinbelow with reference to the sequence listing part.

[0562] VGAM43 host target gene, herein designated VGAM HOST TARGET GENE, encodes a corresponding messenger RNA, VGAM43 host target RNA, herein designated VGAM HOST TARGET RNA. VGAM43 host target RNA, herein designated VGAM HOST TARGET RNA, comprises three regions, as is typical of mRNA of a protein coding gene: a 5 untranslated region, a protein coding region and a 3 untranslated region, designated 5UTR, PROTEIN CODING and 3UTR respectively.

[0563] VGAM43 RNA, herein designated VGAM RNA, binds complementarily to one or more host target binding sites located in untranslated regions of VGAM43 host target RNA, herein designated VGAM HOST TARGET RNA. This complementary binding is due to the fact that the nucleotide sequence of VGAM43 RNA, herein designated VGAM RNA, is an accurate or a partial inversed-reversed sequence of the nucleotide sequence of each of the host target binding sites. As an illustration, FIG. 1 shows 3 such host target binding sites, designated BINDING SITE I, BINDING SITE II and BINDING SITE III respectively. It is appreciated that the number of host target binding sites shown in FIG. 1 is meant as an illustration only, and is not meant to be limiting VGAM43 RNA, herein designated VGAM RNA, may have a different number of host target binding sites in untranslated regions of a VGAM43 host target RNA, herein designated VGAM HOST TARGET RNA. It is further appreciated that while FIG. 1 depicts host target binding sites in the 3UTR region, this is meant as an example only these host target binding sites may be located in the 3UTR region, the 5UTR region, or in both 3UTR and 5UTR regions.

[0564] The complementary binding of VGAM43 RNA, herein designated VGAM RNA, to host target binding sites on VGAM43 host target RNA, herein designated VGAM HOST TARGET RNA, such as BINDING SITE I, BINDING SITE II and BINDING SITE III, inhibits translation of VGAM43 host target RNA, herein designated VGAM HOST TARGET RNA, into VGAM43 host target protein, herein designated VGAM HOST TARGET PROTEIN. VGAM host target protein is therefore outlined by a broken line.

[0565] It is appreciated that VGAM43 host target gene, herein designated VGAM HOST TARGET GENE, in fact represents a plurality of VGAM43 host target genes. The mRNA of each one of this plurality of VGAM43 host target genes comprises one or more host target binding sites, each having a nucleotide sequence which is at least partly complementary to VGAM43 RNA, herein designated VGAM RNA, and which when bound by VGAM43 RNA, herein designated VGAM RNA, causes inhibition of translation of respective one or more VGAM43 host target proteins.

[0566] It is further appreciated by one skilled in the art that the mode of translational inhibition illustrated by FIG. 1 with specific reference to translational inhibition exerted by VGAM43 gene, herein designated VGAM GENE, on one or more VGAM43 host target gene, herein designated VGAM HOST TARGET GENE, is in fact common to other known non-viral miRNA genes. As mentioned hereinabove with reference to the background section, although a specific complementary binding site has been demonstrated only for some of the known miRNA genes (primarily Lin-4 and Let-7), all other recently discovered miRNA genes are also believed by those skilled in the art to modulate expression of other genes by complementary binding, although specific complementary binding sites of these other miRNA genes have not yet been found (Ruvkun G., Perspective: Glimpses of a tiny RNA world, Science 294, 779 (2001)).

[0567] It is yet further appreciated that a function of VGAM43 is inhibition of expression of host target genes, as part of a novel viral mechanism of attacking a host. Accordingly, utilities of VGAM43 include diagnosis, prevention and treatment of viral infection by Vaccinia virus. Specific functions, and accordingly utilities, of VGAM43 correlate with, and may be deduced from, the identity of the host target genes which VGAM43 binds and inhibits, and the function of these host target genes, as elaborated hereinbelow.

[0568] Nucleotide sequences of the VGAM43 precursor RNA, herein designated VGAM PRECURSOR RNA, and of the diced VGAM43 RNA, herein designated VGAM RNA, and a schematic representation of the secondary folding of VGAM43 folded precursor RNA, herein designated VGAM FOLDED PRECURSOR RNA, of VGAM43 are further described hereinbelow with reference to Table 1.

[0569] Nucleotide sequences of host target binding sites, such as BINDING SITE-I, BINDING SITE-II and BINDING SITE-III of FIG. 1, found on, and schematic representation of the complementarity of each of these host target binding sites to VGAM43 RNA, herein designated VGAM RNA, are described hereinbelow with reference to Table 2.

[0570] FIG. 1 further provides a conceptual description of another novel bioinformatically detected viral gene of the present invention, referred to here as Viral Genomic Address Messenger 44 (VGAM44) viral gene, which modulates expression of respective host target genes thereof, the function and utility of which host target genes is known in the art.

[0571] VGAM44 is a novel bioinformatically detected regulatory, non protein coding, viral micro RNA (miRNA) gene. The method by which VGAM44 was detected is described hereinabove with reference to FIGS. 2-8.

[0572] VGAM44 gene, herein designated VGAM GENE, is a viral gene contained in the genome of Vaccinia virus. VGAM44 host target gene, herein designated VGAM HOST TARGET GENE, is a human gene contained in the human genome.

[0573] VGAM44 gene, herein designated VGAM GENE, encodes a VGAM44 precursor RNA, herein designated VGAM PRECURSOR RNA. Similar to other miRNA genes, and unlike most ordinary genes, VGAM44 precursor RNA, herein designated VGAM PRECURSOR RNA, does not encode a protein. A nucleotide sequence identical or highly similar to the nucleotide sequence of VGAM44 precursor RNA is designated SEQ ID:30, and is provided hereinbelow with reference to the sequence listing part. Nucleotide sequence SEQ ID:30 is located at position 963 relative to the genome of Vaccinia virus.

[0574] VGAM44 precursor RNA, herein designated VGAM PRECURSOR RNA, folds onto itself, forming VGAM44 folded precursor RNA, herein designated VGAM FOLDED PRECURSOR RNA, which has a two-dimensional hairpin structure. As is well known in the art, this hairpin structure, is typical of RNA encoded by miRNA genes, and is due to the fact that the nucleotide sequence of the first half of the RNA encoded by a miRNA gene is an accurate or partial inversed-reversed sequence of the nucleotide sequence of the second half thereof.

[0575] An enzyme complex designated DICER COMPLEX, dices the VGAM44 folded precursor RNA, herein designated VGAM FOLDED PRECURSOR RNA, into VGAM44 RNA, herein designated VGAM RNA, a single stranded ˜22 nt long RNA segment. As is known in the art, dicing of a hairpin structured RNA precursor product into a short ˜22 nt RNA segment is catalyzed by an enzyme complex comprising an enzyme called Dicer together with other necessary proteins. A probable (over 92%) nucleotide sequence of VGAM44 RNA is designated SEQ ID:379, and is provided hereinbelow with reference to the sequence listing part.

[0576] VGAM44 host target gene, herein designated VGAM HOST TARGET GENE, encodes a corresponding messenger RNA, VGAM44 host target RNA, herein designated VGAM HOST TARGET RNA. VGAM44 host target RNA, herein designated VGAM HOST TARGET RNA, comprises three regions, as is typical of mRNA of a protein coding gene: a 5 untranslated region, a protein coding region and a 3 untranslated region, designated 5UTR, PROTEIN CODING and 3UTR respectively.

[0577] VGAM44 RNA, herein designated VGAM RNA, binds complementarily to one or more host target binding sites located in untranslated regions of VGAM44 host target RNA, herein designated VGAM HOST TARGET RNA. This complementary binding is due to the fact that the nucleotide sequence of VGAM44 RNA, herein designated VGAM RNA, is an accurate or a partial inversed-reversed sequence of the nucleotide sequence of each of the host target binding sites. As an illustration, FIG. 1 shows 3 such host target binding sites, designated BINDING SITE I, BINDING SITE II and BINDING SITE III respectively. It is appreciated that the number of host target binding sites shown in FIG. 1 is meant as an illustration only, and is not meant to be limiting VGAM44 RNA, herein designated VGAM RNA, may have a different number of host target binding sites in untranslated regions of a VGAM44 host target RNA, herein designated VGAM HOST TARGET RNA. It is further appreciated that while FIG. 1 depicts host target binding sites in the 3UTR region, this is meant as an example only these host target binding sites may be located in the 3UTR region, the 5UTR region, or in both 3UTR and 5UTR regions.

[0578] The complementary binding of VGAM44 RNA, herein designated VGAM RNA, to host target binding sites on VGAM44 host target RNA, herein designated VGAM HOST TARGET RNA, such as BINDING SITE I, BINDING SITE II and BINDING SITE III, inhibits translation of VGAM44 host target RNA, herein designated VGAM HOST TARGET RNA, into VGAM44 host target protein, herein designated VGAM HOST TARGET PROTEIN. VGAM host target protein is therefore outlined by a broken line.

[0579] It is appreciated that VGAM44 host target gene, herein designated VGAM HOST TARGET GENE, in fact represents a plurality of VGAM44 host target genes. The mRNA of each one of this plurality of VGAM44 host target genes comprises one or more host target binding sites, each having a nucleotide sequence which is at least partly complementary to VGAM44 RNA, herein designated VGAM RNA, and which when bound by VGAM44 RNA, herein designated VGAM RNA, causes inhibition of translation of respective one or more VGAM44 host target proteins.

[0580] It is further appreciated by one skilled in the art that the mode of translational inhibition illustrated by FIG. 1 with specific reference to translational inhibition exerted by VGAM44 gene, herein designated VGAM GENE, on one or more VGAM44 host target gene, herein designated VGAM HOST TARGET GENE, is in fact common to other known non-viral miRNA genes. As mentioned hereinabove with reference to the background section, although a specific complementary binding site has been demonstrated only for some of the known miRNA genes (primarily Lin-4 and Let-7), all other recently discovered miRNA genes are also believed by those skilled in the art to modulate expression of other genes by complementary binding, although specific complementary binding sites of these other miRNA genes have not yet been found (Ruvkun G., Perspective: Glimpses of a tiny RNA world, Science 294, 779 (2001)).

[0581] It is yet further appreciated that a function of VGAM44 is inhibition of expression of host target genes, as part of a novel viral mechanism of attacking a host. Accordingly, utilities of VGAM44 include diagnosis, prevention and treatment of viral infection by Vaccinia virus. Specific functions, and accordingly utilities, of VGAM44 correlate with, and may be deduced from, the identity of the host target genes which VGAM44 binds and inhibits, and the function of these host target genes, as elaborated hereinbelow.

[0582] Nucleotide sequences of the VGAM44 precursor RNA, herein designated VGAM PRECURSOR RNA, and of the diced VGAM44 RNA, herein designated VGAM RNA, and a schematic representation of the secondary folding of VGAM44 folded precursor RNA, herein designated VGAM FOLDED PRECURSOR RNA, of VGAM44 are further described hereinbelow with reference to Table 1.

[0583] Nucleotide sequences of host target binding sites, such as BINDING SITE-I, BINDING SITE-II and BINDING SITE-III of FIG. 1, found on, and schematic representation of the complementarity of each of these host target binding sites to VGAM44 RNA, herein designated VGAM RNA, are described hereinbelow with reference to Table 2.

[0584] FIG. 1 further provides a conceptual description of another novel bioinformatically detected viral gene of the present invention, referred to here as Viral Genomic Address Messenger 45 (VGAM45) viral gene, which modulates expression of respective host target genes thereof, the function and utility of which host target genes is known in the art.

[0585] VGAM45 is a novel bioinformatically detected regulatory, non protein coding, viral micro RNA (miRNA) gene. The method by which VGAM45 was detected is described hereinabove with reference to FIGS. 2-8.

[0586] VGAM45 gene, herein designated VGAM GENE, is a viral gene contained in the genome of Vaccinia virus. VGAM45 host target gene, herein designated VGAM HOST TARGET GENE, is a human gene contained in the human genome.

[0587] VGAM45 gene, herein designated VGAM GENE, encodes a VGAM45 precursor RNA, herein designated VGAM PRECURSOR RNA. Similar to other miRNA genes, and unlike most ordinary genes, VGAM45 precursor RNA, herein designated VGAM PRECURSOR RNA, does not encode a protein. A nucleotide sequence identical or highly similar to the nucleotide sequence of VGAM45 precursor RNA is designated SEQ ID:31, and is provided hereinbelow with reference to the sequence listing part. Nucleotide sequence SEQ ID:31 is located at position 2576 relative to the genome of Vaccinia virus.

[0588] VGAM45 precursor RNA, herein designated VGAM PRECURSOR RNA, folds onto itself, forming VGAM45 folded precursor RNA, herein designated VGAM FOLDED PRECURSOR RNA, which has a two-dimensional hairpin structure. As is well known in the art, this hairpin structure, is typical of RNA encoded by miRNA genes, and is due to the fact that the nucleotide sequence of the first half of the RNA encoded by a miRNA gene is an accurate or partial inversed-reversed sequence of the nucleotide sequence of the second half thereof.

[0589] An enzyme complex designated DICER COMPLEX, dices the VGAM45 folded precursor RNA, herein designated VGAM FOLDED PRECURSOR RNA, into VGAM45 RNA, herein designated VGAM RNA, a single stranded ˜22 nt long RNA segment. As is known in the art, dicing of a hairpin structured RNA precursor product into a short ˜22 nt RNA segment is catalyzed by an enzyme complex comprising an enzyme called Dicer together with other necessary proteins. A probable (over 92%) nucleotide sequence of VGAM45 RNA is designated SEQ ID:380, and is provided hereinbelow with reference to the sequence listing part.

[0590] VGAM45 host target gene, herein designated VGAM HOST TARGET GENE, encodes a corresponding messenger RNA, VGAM45 host target RNA, herein designated VGAM HOST TARGET RNA. VGAM45 host target RNA, herein designated VGAM HOST TARGET RNA, comprises three regions, as is typical of mRNA of a protein coding gene: a 5 untranslated region, a protein coding region and a 3 untranslated region, designated 5UTR, PROTEIN CODING and 3UTR respectively.

[0591] VGAM45 RNA, herein designated VGAM RNA, binds complementarily to one or more host target binding sites located in untranslated regions of VGAM45 host target RNA, herein designated VGAM HOST TARGET RNA. This complementary binding is due to the fact that the nucleotide sequence of VGAM45 RNA, herein designated VGAM RNA, is an accurate or a partial inversed-reversed sequence of the nucleotide sequence of each of the host target binding sites. As an illustration, FIG. 1 shows 3 such host target binding sites, designated BINDING SITE I, BINDING SITE II and BINDING SITE III respectively. It is appreciated that the number of host target binding sites shown in FIG. 1 is meant as an illustration only, and is not meant to be limiting VGAM45 RNA, herein designated VGAM RNA, may have a different number of host target binding sites in untranslated regions of a VGAM45 host target RNA, herein designated VGAM HOST TARGET RNA. It is further appreciated that while FIG. 1 depicts host target binding sites in the 3UTR region, this is meant as an example only these host target binding sites may be located in the 3UTR region, the 5UTR region, or in both 3UTR and 5UTR regions.

[0592] The complementary binding of VGAM45 RNA, herein designated VGAM RNA, to host target binding sites on VGAM45 host target RNA, herein designated VGAM HOST TARGET RNA, such as BINDING SITE I, BINDING SITE II and BINDING SITE III, inhibits translation of VGAM45 host target RNA, herein designated VGAM HOST TARGET RNA, into VGAM45 host target protein, herein designated VGAM HOST TARGET PROTEIN. VGAM host target protein is therefore outlined by a broken line.

[0593] It is appreciated that VGAM45 host target gene, herein designated VGAM HOST TARGET GENE, in fact represents a plurality of VGAM45 host target genes. The mRNA of each one of this plurality of VGAM45 host target genes comprises one or more host target binding sites, each having a nucleotide sequence which is at least partly complementary to VGAM45 RNA, herein designated VGAM RNA, and which when bound by VGAM45 RNA, herein designated VGAM RNA, causes inhibition of translation of respective one or more VGAM45 host target proteins.

[0594] It is further appreciated by one skilled in the art that the mode of translational inhibition illustrated by FIG. 1 with specific reference to translational inhibition exerted by VGAM45 gene, herein designated VGAM GENE, on one or more VGAM45 host target gene, herein designated VGAM HOST TARGET GENE, is in fact common to other known non-viral miRNA genes. As mentioned hereinabove with reference to the background section, although a specific complementary binding site has been demonstrated only for some of the known miRNA genes (primarily Lin-4 and Let-7), all other recently discovered miRNA genes are also believed by those skilled in the art to modulate expression of other genes by complementary binding, although specific complementary binding sites of these other miRNA genes have not yet been found (Ruvkun G., Perspective: Glimpses of a tiny RNA world, Science 294, 779 (2001)).

[0595] It is yet further appreciated that a function of VGAM45 is inhibition of expression of host target genes, as part of a novel viral mechanism of attacking a host. Accordingly, utilities of VGAM45 include diagnosis, prevention and treatment of viral infection by Vaccinia virus. Specific functions, and accordingly utilities, of VGAM45 correlate with, and may be deduced from, the identity of the host target genes which VGAM45 binds and inhibits, and the function of these host target genes, as elaborated hereinbelow.

[0596] Nucleotide sequences of the VGAM45 precursor RNA, herein designated VGAM PRECURSOR RNA, and of the diced VGAM45 RNA, herein designated VGAM RNA, and a schematic representation of the secondary folding of VGAM45 folded precursor RNA, herein designated VGAM FOLDED PRECURSOR RNA, of VGAM45 are further described hereinbelow with reference to Table 1.

[0597] Nucleotide sequences of host target binding sites, such as BINDING SITE-I, BINDING SITE-II and BINDING SITE-III of FIG. 1, found on, and schematic representation of the complementarity of each of these host target binding sites to VGAM45 RNA, herein designated VGAM RNA, are described hereinbelow with reference to Table 2.

[0598] FIG. 1 further provides a conceptual description of another novel bioinformatically detected viral gene of the present invention, referred to here as Viral Genomic Address Messenger 46 (VGAM46) viral gene, which modulates expression of respective host target genes thereof, the function and utility of which host target genes is known in the art.

[0599] VGAM46 is a novel bioinformatically detected regulatory, non protein coding, viral micro RNA (miRNA) gene. The method by which VGAM46 was detected is described hereinabove with reference to FIGS. 2-8.

[0600] VGAM46 gene, herein designated VGAM GENE, is a viral gene contained in the genome of Vaccinia virus. VGAM46 host target gene, herein designated VGAM HOST TARGET GENE, is a human gene contained in the human genome.

[0601] VGAM46 gene, herein designated VGAM GENE, encodes a VGAM46 precursor RNA, herein designated VGAM PRECURSOR RNA. Similar to other miRNA genes, and unlike most ordinary genes, VGAM46 precursor RNA, herein designated VGAM PRECURSOR RNA, does not encode a protein. A nucleotide sequence identical or highly similar to the nucleotide sequence of VGAM46 precursor RNA is designated SEQ ID:32, and is provided hereinbelow with reference to the sequence listing part. Nucleotide sequence SEQ ID:32 is located at position 4213 relative to the genome of Vaccinia virus.

[0602] VGAM46 precursor RNA, herein designated VGAM PRECURSOR RNA, folds onto itself, forming VGAM46 folded precursor RNA, herein designated VGAM FOLDED PRECURSOR RNA, which has a two-dimensional hairpin structure. As is well known in the art, this hairpin structure, is typical of RNA encoded by miRNA genes, and is due to the fact that the nucleotide sequence of the first half of the RNA encoded by a miRNA gene is an accurate or partial inversed-reversed sequence of the nucleotide sequence of the second half thereof.

[0603] An enzyme complex designated DICER COMPLEX, dices the VGAM46 folded precursor RNA, herein designated VGAM FOLDED PRECURSOR RNA, into VGAM46 RNA, herein designated VGAM RNA, a single stranded ˜22 nt long RNA segment. As is known in the art, dicing of a hairpin structured RNA precursor product into a short ˜22 nt RNA segment is catalyzed by an enzyme complex comprising an enzyme called Dicer together with other necessary proteins. A probable (over 92%) nucleotide sequence of VGAM46 RNA is designated SEQ ID:381, and is provided hereinbelow with reference to the sequence listing part.

[0604] VGAM46 host target gene, herein designated VGAM HOST TARGET GENE, encodes a corresponding messenger RNA, VGAM46 host target RNA, herein designated VGAM HOST TARGET RNA. VGAM46 host target RNA, herein designated VGAM HOST TARGET RNA, comprises three regions, as is typical of mRNA of a protein coding gene: a 5 untranslated region, a protein coding region and a 3 untranslated region, designated 5UTR, PROTEIN CODING and 3UTR respectively.

[0605] VGAM46 RNA, herein designated VGAM RNA, binds complementarily to one or more host target binding sites located in untranslated regions of VGAM46 host target RNA, herein designated VGAM HOST TARGET RNA. This complementary binding is due to the fact that the nucleotide sequence of VGAM46 RNA, herein designated VGAM RNA, is an accurate or a partial inversed-reversed sequence of the nucleotide sequence of each of the host target binding sites. As an illustration, FIG. 1 shows 3 such host target binding sites, designated BINDING SITE I, BINDING SITE II and BINDING SITE III respectively. It is appreciated that the number of host target binding sites shown in FIG. 1 is meant as an illustration only, and is not meant to be limiting VGAM46 RNA, herein designated VGAM RNA, may have a different number of host target binding sites in untranslated regions of a VGAM46 host target RNA, herein designated VGAM HOST TARGET RNA. It is further appreciated that while FIG. 1 depicts host target binding sites in the 3UTR region, this is meant as an example only these host target binding sites may be located in the 3UTR region, the 5UTR region, or in both 3UTR and 5UTR regions.

[0606] The complementary binding of VGAM46 RNA, herein designated VGAM RNA, to host target binding sites on VGAM46 host target RNA, herein designated VGAM HOST TARGET RNA, such as BINDING SITE I, BINDING SITE II and BINDING SITE III, inhibits translation of VGAM46 host target RNA, herein designated VGAM HOST TARGET RNA, into VGAM46 host target protein, herein designated VGAM HOST TARGET PROTEIN. VGAM host target protein is therefore outlined by a broken line.

[0607] It is appreciated that VGAM46 host target gene, herein designated VGAM HOST TARGET GENE, in fact represents a plurality of VGAM46 host target genes. The mRNA of each one of this plurality of VGAM46 host target genes comprises one or more host target binding sites, each having a nucleotide sequence which is at least partly complementary to VGAM46 RNA, herein designated VGAM RNA, and which when bound by VGAM46 RNA, herein designated VGAM RNA, causes inhibition of translation of respective one or more VGAM46 host target proteins.

[0608] It is further appreciated by one skilled in the art that the mode of translational inhibition illustrated by FIG. 1 with specific reference to translational inhibition exerted by VGAM46 gene, herein designated VGAM GENE, on one or more VGAM46 host target gene, herein designated VGAM HOST TARGET GENE, is in fact common to other known non-viral miRNA genes. As mentioned hereinabove with reference to the background section, although a specific complementary binding site has been demonstrated only for some of the known miRNA genes (primarily Lin-4 and Let-7), all other recently discovered miRNA genes are also believed by those skilled in the art to modulate expression of other genes by complementary binding, although specific complementary binding sites of these other miRNA genes have not yet been found (Ruvkun G., Perspective: Glimpses of a tiny RNA world, Science 294, 779 (2001)).

[0609] It is yet further appreciated that a function of VGAM46 is inhibition of expression of host target genes, as part of a novel viral mechanism of attacking a host. Accordingly, utilities of VGAM46 include diagnosis, prevention and treatment of viral infection by Vaccinia virus. Specific functions, and accordingly utilities, of VGAM46 correlate with, and may be deduced from, the identity of the host target genes which VGAM46 binds and inhibits, and the function of these host target genes, as elaborated hereinbelow.

[0610] Nucleotide sequences of the VGAM46 precursor RNA, herein designated VGAM PRECURSOR RNA, and of the diced VGAM46 RNA, herein designated VGAM RNA, and a schematic representation of the secondary folding of VGAM46 folded precursor RNA, herein designated VGAM FOLDED PRECURSOR RNA, of VGAM46 are further described hereinbelow with reference to Table 1.

[0611] Nucleotide sequences of host target binding sites, such as BINDING SITE-I, BINDING SITE-II and BINDING SITE-III of FIG. 1, found on, and schematic representation of the complementarity of each of these host target binding sites to VGAM46 RNA, herein designated VGAM RNA, are described hereinbelow with reference to Table 2.

[0612] FIG. 1 further provides a conceptual description of another novel bioinformatically detected viral gene of the present invention, referred to here as Viral Genomic Address Messenger 47 (VGAM47) viral gene, which modulates expression of respective host target genes thereof, the function and utility of which host target genes is known in the art.

[0613] VGAM47 is a novel bioinformatically detected regulatory, non protein coding, viral micro RNA (miRNA) gene. The method by which VGAM47 was detected is described hereinabove with reference to FIGS. 2-8.

[0614] VGAM47 gene, herein designated VGAM GENE, is a viral gene contained in the genome of Vaccinia virus. VGAM47 host target gene, herein designated VGAM HOST TARGET GENE, is a human gene contained in the human genome.

[0615] VGAM47 gene, herein designated VGAM GENE, encodes a VGAM47 precursor RNA, herein designated VGAM PRECURSOR RNA. Similar to other miRNA genes, and unlike most ordinary genes, VGAM47 precursor RNA, herein designated VGAM PRECURSOR RNA, does not encode a protein. A nucleotide sequence identical or highly similar to the nucleotide sequence of VGAM47 precursor RNA is designated SEQ ID:33, and is provided hereinbelow with reference to the sequence listing part. Nucleotide sequence SEQ ID:33 is located at position 3249 relative to the genome of Vaccinia virus.

[0616] VGAM47 precursor RNA, herein designated VGAM PRECURSOR RNA, folds onto itself, forming VGAM47 folded precursor RNA, herein designated VGAM FOLDED PRECURSOR RNA, which has a two-dimensional hairpin structure. As is well known in the art, this hairpin structure, is typical of RNA encoded by miRNA genes, and is due to the fact that the nucleotide sequence of the first half of the RNA encoded by a miRNA gene is an accurate or partial inversed-reversed sequence of the nucleotide sequence of the second half thereof.

[0617] An enzyme complex designated DICER COMPLEX, dices the VGAM47 folded precursor RNA, herein designated VGAM FOLDED PRECURSOR RNA, into VGAM47 RNA, herein designated VGAM RNA, a single stranded ˜22 nt long RNA segment. As is known in the art, dicing of a hairpin structured RNA precursor product into a short ˜22 nt RNA segment is catalyzed by an enzyme complex comprising an enzyme called Dicer together with other necessary proteins. A probable (over 76%) nucleotide sequence of VGAM47 RNA is designated SEQ ID:382, and is provided hereinbelow with reference to the sequence listing part.

[0618] VGAM47 host target gene, herein designated VGAM HOST TARGET GENE, encodes a corresponding messenger RNA, VGAM47 host target RNA, herein designated VGAM HOST TARGET RNA. VGAM47 host target RNA, herein designated VGAM HOST TARGET RNA, comprises three regions, as is typical of mRNA of a protein coding gene: a 5 untranslated region, a protein coding region and a 3 untranslated region, designated 5UTR, PROTEIN CODING and 3UTR respectively.

[0619] VGAM47 RNA, herein designated VGAM RNA, binds complementarily to one or more host target binding sites located in untranslated regions of VGAM47 host target RNA, herein designated VGAM HOST TARGET RNA. This complementary binding is due to the fact that the nucleotide sequence of VGAM47 RNA, herein designated VGAM RNA, is an accurate or a partial inversed-reversed sequence of the nucleotide sequence of each of the host target binding sites. As an illustration, FIG. 1 shows 3 such host target binding sites, designated BINDING SITE I, BINDING SITE II and BINDING SITE III respectively. It is appreciated that the number of host target binding sites shown in FIG. 1 is meant as an illustration only, and is not meant to be limiting VGAM47 RNA, herein designated VGAM RNA, may have a different number of host target binding sites in untranslated regions of a VGAM47 host target RNA, herein designated VGAM HOST TARGET RNA. It is further appreciated that while FIG. 1 depicts host target binding sites in the 3UTR region, this is meant as an example only these host target binding sites may be located in the 3UTR region, the 5UTR region, or in both 3UTR and 5UTR regions.

[0620] The complementary binding of VGAM47 RNA, herein designated VGAM RNA, to host target binding sites on VGAM47 host target RNA, herein designated VGAM HOST TARGET RNA, such as BINDING SITE I, BINDING SITE II and BINDING SITE III, inhibits translation of VGAM47 host target RNA, herein designated VGAM HOST TARGET RNA, into VGAM47 host target protein, herein designated VGAM HOST TARGET PROTEIN. VGAM host target protein is therefore outlined by a broken line.

[0621] It is appreciated that VGAM47 host target gene, herein designated VGAM HOST TARGET GENE, in fact represents a plurality of VGAM47 host target genes. The mRNA of each one of this plurality of VGAM47 host target genes comprises one or more host target binding sites, each having a nucleotide sequence which is at least partly complementary to VGAM47 RNA, herein designated VGAM RNA, and which when bound by VGAM47 RNA, herein designated VGAM RNA, causes inhibition of translation of respective one or more VGAM47 host target proteins.

[0622] It is further appreciated by one skilled in the art that the mode of translational inhibition illustrated by FIG. 1 with specific reference to translational inhibition exerted by VGAM47 gene, herein designated VGAM GENE, on one or more VGAM47 host target gene, herein designated VGAM HOST TARGET GENE, is in fact common to other known non-viral miRNA genes. As mentioned hereinabove with reference to the background section, although a specific complementary binding site has been demonstrated only for some of the known miRNA genes (primarily Lin-4 and Let-7), all other recently discovered miRNA genes are also believed by those skilled in the art to modulate expression of other genes by complementary binding, although specific complementary binding sites of these other miRNA genes have not yet been found (Ruvkun G., Perspective: Glimpses of a tiny RNA world, Science 294, 779 (2001)).

[0623] It is yet further appreciated that a function of VGAM47 is inhibition of expression of host target genes, as part of a novel viral mechanism of attacking a host. Accordingly, utilities of VGAM47 include diagnosis, prevention and treatment of viral infection by Vaccinia virus. Specific functions, and accordingly utilities, of VGAM47 correlate with, and may be deduced from, the identity of the host target genes which VGAM47 binds and inhibits, and the function of these host target genes, as elaborated hereinbelow.

[0624] Nucleotide sequences of the VGAM47 precursor RNA, herein designated VGAM PRECURSOR RNA, and of the diced VGAM47 RNA, herein designated VGAM RNA, and a schematic representation of the secondary folding of VGAM47 folded precursor RNA, herein designated VGAM FOLDED PRECURSOR RNA, of VGAM47 are further described hereinbelow with reference to Table 1.

[0625] Nucleotide sequences of host target binding sites, such as BINDING SITE-I, BINDING SITE-II and BINDING SITE-III of FIG. 1, found on, and schematic representation of the complementarity of each of these host target binding sites to VGAM47 RNA, herein designated VGAM RNA, are described hereinbelow with reference to Table 2.

[0626] FIG. 1 further provides a conceptual description of another novel bioinformatically detected viral gene of the present invention, referred to here as Viral Genomic Address Messenger 48 (VGAM48) viral gene, which modulates expression of respective host target genes thereof, the function and utility of which host target genes is known in the art.

[0627] VGAM48 is a novel bioinformatically detected regulatory, non protein coding, viral micro RNA (miRNA) gene. The method by which VGAM48 was detected is described hereinabove with reference to FIGS. 2-8.

[0628] VGAM48 gene, herein designated VGAM GENE, is a viral gene contained in the genome of Vaccinia virus. VGAM48 host target gene, herein designated VGAM HOST TARGET GENE, is a human gene contained in the human genome.

[0629] VGAM48 gene, herein designated VGAM GENE, encodes a VGAM48 precursor RNA, herein designated VGAM PRECURSOR RNA. Similar to other miRNA genes, and unlike most ordinary genes, VGAM48 precursor RNA, herein designated VGAM PRECURSOR RNA, does not encode a protein. A nucleotide sequence identical or highly similar to the nucleotide sequence of VGAM48 precursor RNA is designated SEQ ID:34, and is provided hereinbelow with reference to the sequence listing part. Nucleotide sequence SEQ ID:34 is located at position 3681 relative to the genome of Vaccinia virus.

[0630] VGAM48 precursor RNA, herein designated VGAM PRECURSOR RNA, folds onto itself, forming VGAM48 folded precursor RNA, herein designated VGAM FOLDED PRECURSOR RNA, which has a two-dimensional hairpin structure. As is well known in the art, this hairpin structure, is typical of RNA encoded by miRNA genes, and is due to the fact that the nucleotide sequence of the first half of the RNA encoded by a miRNA gene is an accurate or partial inversed-reversed sequence of the nucleotide sequence of the second half thereof.

[0631] An enzyme complex designated DICER COMPLEX, dices the VGAM48 folded precursor RNA, herein designated VGAM FOLDED PRECURSOR RNA, into VGAM48 RNA, herein designated VGAM RNA, a single stranded ˜22 nt long RNA segment. As is known in the art, dicing of a hairpin structured RNA precursor product into a short ˜22 nt RNA segment is catalyzed by an enzyme complex comprising an enzyme called Dicer together with other necessary proteins. A probable (over 75%) nucleotide sequence of VGAM48 RNA is designated SEQ ID:383, and is provided hereinbelow with reference to the sequence listing part.

[0632] VGAM48 host target gene, herein designated VGAM HOST TARGET GENE, encodes a corresponding messenger RNA, VGAM48 host target RNA, herein designated VGAM HOST TARGET RNA. VGAM48 host target RNA, herein designated VGAM HOST TARGET RNA, comprises three regions, as is typical of mRNA of a protein coding gene: a 5 untranslated region, a protein coding region and a 3 untranslated region, designated 5UTR, PROTEIN CODING and 3UTR respectively.

[0633] VGAM48 RNA, herein designated VGAM RNA, binds complementarily to one or more host target binding sites located in untranslated regions of VGAM48 host target RNA, herein designated VGAM HOST TARGET RNA. This complementary binding is due to the fact that the nucleotide sequence of VGAM48 RNA, herein designated VGAM RNA, is an accurate or a partial inversed-reversed sequence of the nucleotide sequence of each of the host target binding sites. As an illustration, FIG. 1 shows 3 such host target binding sites, designated BINDING SITE I, BINDING SITE II and BINDING SITE III respectively. It is appreciated that the number of host target binding sites shown in FIG. 1 is meant as an illustration only, and is not meant to be limiting VGAM48 RNA, herein designated VGAM RNA, may have a different number of host target binding sites in untranslated regions of a VGAM48 host target RNA, herein designated VGAM HOST TARGET RNA. It is further appreciated that while FIG. 1 depicts host target binding sites in the 3UTR region, this is meant as an example only these host target binding sites may be located in the 3UTR region, the 5UTR region, or in both 3UTR and 5UTR regions.

[0634] The complementary binding of VGAM48 RNA, herein designated VGAM RNA, to host target binding sites on VGAM48 host target RNA, herein designated VGAM HOST TARGET RNA, such as BINDING SITE I, BINDING SITE II and BINDING SITE III, inhibits translation of VGAM48 host target RNA, herein designated VGAM HOST TARGET RNA, into VGAM48 host target protein, herein designated VGAM HOST TARGET PROTEIN. VGAM host target protein is therefore outlined by a broken line.

[0635] It is appreciated that VGAM48 host target gene, herein designated VGAM HOST TARGET GENE, in fact represents a plurality of VGAM48 host target genes. The mRNA of each one of this plurality of VGAM48 host target genes comprises one or more host target binding sites, each having a nucleotide sequence which is at least partly complementary to VGAM48 RNA, herein designated VGAM RNA, and which when bound by VGAM48 RNA, herein designated VGAM RNA, causes inhibition of translation of respective one or more VGAM48 host target proteins.

[0636] It is further appreciated by one skilled in the art that the mode of translational inhibition illustrated by FIG. 1 with specific reference to translational inhibition exerted by VGAM48 gene, herein designated VGAM GENE, on one or more VGAM48 host target gene, herein designated VGAM HOST TARGET GENE, is in fact common to other known non-viral miRNA genes. As mentioned hereinabove with reference to the background section, although a specific complementary binding site has been demonstrated only for some of the known miRNA genes (primarily Lin-4 and Let-7), all other recently discovered miRNA genes are also believed by those skilled in the art to modulate expression of other genes by complementary binding, although specific complementary binding sites of these other miRNA genes have not yet been found (Ruvkun G., Perspective: Glimpses of a tiny RNA world, Science 294, 779 (2001)).

[0637] It is yet further appreciated that a function of VGAM48 is inhibition of expression of host target genes, as part of a novel viral mechanism of attacking a host. Accordingly, utilities of VGAM48 include diagnosis, prevention and treatment of viral infection by Vaccinia virus. Specific functions, and accordingly utilities, of VGAM48 correlate with, and may be deduced from, the identity of the host target genes which VGAM48 binds and inhibits, and the function of these host target genes, as elaborated hereinbelow.

[0638] Nucleotide sequences of the VGAM48 precursor RNA, herein designated VGAM PRECURSOR RNA, and of the diced VGAM48 RNA, herein designated VGAM RNA, and a schematic representation of the secondary folding of VGAM48 folded precursor RNA, herein designated VGAM FOLDED PRECURSOR RNA, of VGAM48 are further described hereinbelow with reference to Table 1.

[0639] Nucleotide sequences of host target binding sites, such as BINDING SITE-I, BINDING SITE-II and BINDING SITE-III of FIG. 1, found on, and schematic representation of the complementarity of each of these host target binding sites to VGAM48 RNA, herein designated VGAM RNA, are described hereinbelow with reference to Table 2.

[0640] FIG. 1 further provides a conceptual description of another novel bioinformatically detected viral gene of the present invention, referred to here as Viral Genomic Address Messenger 49 (VGAM49) viral gene, which modulates expression of respective host target genes thereof, the function and utility of which host target genes is known in the art.

[0641] VGAM49 is a novel bioinformatically detected regulatory, non protein coding, viral micro RNA (miRNA) gene. The method by which VGAM49 was detected is described hereinabove with reference to FIGS. 2-8.

[0642] VGAM49 gene, herein designated VGAM GENE, is a viral gene contained in the genome of Vaccinia virus. VGAM49 host target gene, herein designated VGAM HOST TARGET GENE, is a human gene contained in the human genome.

[0643] VGAM49 gene, herein designated VGAM GENE, encodes a VGAM49 precursor RNA, herein designated VGAM PRECURSOR RNA. Similar to other miRNA genes, and unlike most ordinary genes, VGAM49 precursor RNA, herein designated VGAM PRECURSOR RNA, does not encode a protein. A nucleotide sequence identical or highly similar to the nucleotide sequence of VGAM49 precursor RNA is designated SEQ ID:35, and is provided hereinbelow with reference to the sequence listing part. Nucleotide sequence SEQ ID:35 is located at position 3573 relative to the genome of Vaccinia virus.

[0644] VGAM49 precursor RNA, herein designated VGAM PRECURSOR RNA, folds onto itself, forming VGAM49 folded precursor RNA, herein designated VGAM FOLDED PRECURSOR RNA, which has a two-dimensional hairpin structure. As is well known in the art, this hairpin structure, is typical of RNA encoded by miRNA genes, and is due to the fact that the nucleotide sequence of the first half of the RNA encoded by a miRNA gene is an accurate or partial inversed-reversed sequence of the nucleotide sequence of the second half thereof.

[0645] An enzyme complex designated DICER COMPLEX, dices the VGAM49 folded precursor RNA, herein designated VGAM FOLDED PRECURSOR RNA, into VGAM49 RNA, herein designated VGAM RNA, a single stranded ˜22 nt long RNA segment. As is known in the art, dicing of a hairpin structured RNA precursor product into a short ˜22 nt RNA segment is catalyzed by an enzyme complex comprising an enzyme called Dicer together with other necessary proteins. A probable (over 81%) nucleotide sequence of VGAM49 RNA is designated SEQ ID:384, and is provided hereinbelow with reference to the sequence listing part.

[0646] VGAM49 host target gene, herein designated VGAM HOST TARGET GENE, encodes a corresponding messenger RNA, VGAM49 host target RNA, herein designated VGAM HOST TARGET RNA. VGAM49 host target RNA, herein designated VGAM HOST TARGET RNA, comprises three regions, as is typical of mRNA of a protein coding gene: a 5 untranslated region, a protein coding region and a 3 untranslated region, designated 5UTR, PROTEIN CODING and 3UTR respectively.

[0647] VGAM49 RNA, herein designated VGAM RNA, binds complementarily to one or more host target binding sites located in untranslated regions of VGAM49 host target RNA, herein designated VGAM HOST TARGET RNA. This complementary binding is due to the fact that the nucleotide sequence of VGAM49 RNA, herein designated VGAM RNA, is an accurate or a partial inversed-reversed sequence of the nucleotide sequence of each of the host target binding sites. As an illustration, FIG. 1 shows 3 such host target binding sites, designated BINDING SITE I, BINDING SITE II and BINDING SITE III respectively. It is appreciated that the number of host target binding sites shown in FIG. 1 is meant as an illustration only, and is not meant to be limiting VGAM49 RNA, herein designated VGAM RNA, may have a different number of host target binding sites in untranslated regions of a VGAM49 host target RNA, herein designated VGAM HOST TARGET RNA. It is further appreciated that while FIG. 1 depicts host target binding sites in the 3UTR region, this is meant as an example only these host target binding sites may be located in the 3UTR region, the 5UTR region, or in both 3UTR and 5UTR regions.

[0648] The complementary binding of VGAM49 RNA, herein designated VGAM RNA, to host target binding sites on VGAM49 host target RNA, herein designated VGAM HOST TARGET RNA, such as BINDING SITE I, BINDING SITE II and BINDING SITE III, inhibits translation of VGAM49 host target RNA, herein designated VGAM HOST TARGET RNA, into VGAM49 host target protein, herein designated VGAM HOST TARGET PROTEIN. VGAM host target protein is therefore outlined by a broken line.

[0649] It is appreciated that VGAM49 host target gene, herein designated VGAM HOST TARGET GENE, in fact represents a plurality of VGAM49 host target genes. The mRNA of each one of this plurality of VGAM49 host target genes comprises one or more host target binding sites, each having a nucleotide sequence which is at least partly complementary to VGAM49 RNA, herein designated VGAM RNA, and which when bound by VGAM49 RNA, herein designated VGAM RNA, causes inhibition of translation of respective one or more VGAM49 host target proteins.

[0650] It is further appreciated by one skilled in the art that the mode of translational inhibition illustrated by FIG. 1 with specific reference to translational inhibition exerted by VGAM49 gene, herein designated VGAM GENE, on one or more VGAM49 host target gene, herein designated VGAM HOST TARGET GENE, is in fact common to other known non-viral miRNA genes. As mentioned hereinabove with reference to the background section, although a specific complementary binding site has been demonstrated only for some of the known miRNA genes (primarily Lin-4 and Let-7), all other recently discovered miRNA genes are also believed by those skilled in the art to modulate expression of other genes by complementary binding, although specific complementary binding sites of these other miRNA genes have not yet been found (Ruvkun G., Perspective: Glimpses of a tiny RNA world, Science 294, 779 (2001)).

[0651] It is yet further appreciated that a function of VGAM49 is inhibition of expression of host target genes, as part of a novel viral mechanism of attacking a host. Accordingly, utilities of VGAM49 include diagnosis, prevention and treatment of viral infection by Vaccinia virus. Specific functions, and accordingly utilities, of VGAM49 correlate with, and may be deduced from, the identity of the host target genes which VGAM49 binds and inhibits, and the function of these host target genes, as elaborated hereinbelow.

[0652] Nucleotide sequences of the VGAM49 precursor RNA, herein designated VGAM PRECURSOR RNA, and of the diced VGAM49 RNA, herein designated VGAM RNA, and a schematic representation of the secondary folding of VGAM49 folded precursor RNA, herein designated VGAM FOLDED PRECURSOR RNA, of VGAM49 are further described hereinbelow with reference to Table 1.

[0653] Nucleotide sequences of host target binding sites, such as BINDING SITE-I, BINDING SITE-II and BINDING SITE-III of FIG. 1, found on, and schematic representation of the complementarity of each of these host target binding sites to VGAM49 RNA, herein designated VGAM RNA, are described hereinbelow with reference to Table 2.

[0654] FIG. 1 further provides a conceptual description of another novel bioinformatically detected viral gene of the present invention, referred to here as Viral Genomic Address Messenger 50 (VGAM50) viral gene, which modulates expression of respective host target genes thereof, the function and utility of which host target genes is known in the art.

[0655] VGAM50 is a novel bioinformatically detected regulatory, non protein coding, viral micro RNA (miRNA) gene. The method by which VGAM50 was detected is described hereinabove with reference to FIGS. 2-8.

[0656] VGAM50 gene, herein designated VGAM GENE, is a viral gene contained in the genome of Vaccinia virus. VGAM50 host target gene, herein designated VGAM HOST TARGET GENE, is a human gene contained in the human genome.

[0657] VGAM50 gene, herein designated VGAM GENE, encodes a VGAM50 precursor RNA, herein designated VGAM PRECURSOR RNA. Similar to other miRNA genes, and unlike most ordinary genes, VGAM50 precursor RNA, herein designated VGAM PRECURSOR RNA, does not encode a protein. A nucleotide sequence identical or highly similar to the nucleotide sequence of VGAM50 precursor RNA is designated SEQ ID:36, and is provided hereinbelow with reference to the sequence listing part. Nucleotide sequence SEQ ID:36 is located at position 2870 relative to the genome of Vaccinia virus.

[0658] VGAM50 precursor RNA, herein designated VGAM PRECURSOR RNA, folds onto itself, forming VGAM50 folded precursor RNA, herein designated VGAM FOLDED PRECURSOR RNA, which has a two-dimensional hairpin structure. As is well known in the art, this hairpin structure, is typical of RNA encoded by miRNA genes, and is due to the fact that the nucleotide sequence of the first half of the RNA encoded by a miRNA gene is an accurate or partial inversed-reversed sequence of the nucleotide sequence of the second half thereof.

[0659] An enzyme complex designated DICER COMPLEX, dices the VGAM50 folded precursor RNA, herein designated VGAM FOLDED PRECURSOR RNA, into VGAM50 RNA, herein designated VGAM RNA, a single stranded ˜22 nt long RNA segment. As is known in the art, dicing of a hairpin structured RNA precursor product into a short ˜22 nt RNA segment is catalyzed by an enzyme complex comprising an enzyme called Dicer together with other necessary proteins. A probable (over 81%) nucleotide sequence of VGAM50 RNA is designated SEQ ID:385, and is provided hereinbelow with reference to the sequence listing part.

[0660] VGAM50 host target gene, herein designated VGAM HOST TARGET GENE, encodes a corresponding messenger RNA, VGAM50 host target RNA, herein designated VGAM HOST TARGET RNA. VGAM50 host target RNA, herein designated VGAM HOST TARGET RNA, comprises three regions, as is typical of mRNA of a protein coding gene: a 5 untranslated region, a protein coding region and a 3 untranslated region, designated 5UTR, PROTEIN CODING and 3UTR respectively.

[0661] VGAM50 RNA, herein designated VGAM RNA, binds complementarily to one or more host target binding sites located in untranslated regions of VGAM50 host target RNA, herein designated VGAM HOST TARGET RNA. This complementary binding is due to the fact that the nucleotide sequence of VGAM50 RNA, herein designated VGAM RNA, is an accurate or a partial inversed-reversed sequence of the nucleotide sequence of each of the host target binding sites. As an illustration, FIG. 1 shows 3 such host target binding sites, designated BINDING SITE I, BINDING SITE II and BINDING SITE III respectively. It is appreciated that the number of host target binding sites shown in FIG. 1 is meant as an illustration only, and is not meant to be limiting VGAM50 RNA, herein designated VGAM RNA, may have a different number of host target binding sites in untranslated regions of a VGAM50 host target RNA, herein designated VGAM HOST TARGET RNA. It is further appreciated that while FIG. 1 depicts host target binding sites in the 3UTR region, this is meant as an example only these host target binding sites may be located in the 3UTR region, the 5UTR region, or in both 3UTR and 5UTR regions.

[0662] The complementary binding of VGAM50 RNA, herein designated VGAM RNA, to host target binding sites on VGAM50 host target RNA, herein designated VGAM HOST TARGET RNA, such as BINDING SITE I, BINDING SITE II and BINDING SITE III, inhibits translation of VGAM50 host target RNA, herein designated VGAM HOST TARGET RNA, into VGAM50 host target protein, herein designated VGAM HOST TARGET PROTEIN. VGAM host target protein is therefore outlined by a broken line.

[0663] It is appreciated that VGAM50 host target gene, herein designated VGAM HOST TARGET GENE, in fact represents a plurality of VGAM50 host target genes. The mRNA of each one of this plurality of VGAM50 host target genes comprises one or more host target binding sites, each having a nucleotide sequence which is at least partly complementary to VGAM50 RNA, herein designated VGAM RNA, and which when bound by VGAM50 RNA, herein designated VGAM RNA, causes inhibition of translation of respective one or more VGAM50 host target proteins.

[0664] It is further appreciated by one skilled in the art that the mode of translational inhibition illustrated by FIG. 1 with specific reference to translational inhibition exerted by VGAM50 gene, herein designated VGAM GENE, on one or more VGAM50 host target gene, herein designated VGAM HOST TARGET GENE, is in fact common to other known non-viral miRNA genes. As mentioned hereinabove with reference to the background section, although a specific complementary binding site has been demonstrated only for some of the known miRNA genes (primarily Lin-4 and Let-7), all other recently discovered miRNA genes are also believed by those skilled in the art to modulate expression of other genes by complementary binding, although specific complementary binding sites of these other miRNA genes have not yet been found (Ruvkun G., Perspective: Glimpses of a tiny RNA world, Science 294, 779 (2001)).

[0665] It is yet further appreciated that a function of VGAM50 is inhibition of expression of host target genes, as part of a novel viral mechanism of attacking a host. Accordingly, utilities of VGAM50 include diagnosis, prevention and treatment of viral infection by Vaccinia virus. Specific functions, and accordingly utilities, of VGAM50 correlate with, and may be deduced from, the identity of the host target genes which VGAM50 binds and inhibits, and the function of these host target genes, as elaborated hereinbelow.

[0666] Nucleotide sequences of the VGAM50 precursor RNA, herein designated VGAM PRECURSOR RNA, and of the diced VGAM50 RNA, herein designated VGAM RNA, and a schematic representation of the secondary folding of VGAM50 folded precursor RNA, herein designated VGAM FOLDED PRECURSOR RNA, of VGAM50 are further described hereinbelow with reference to Table 1.

[0667] Nucleotide sequences of host target binding sites, such as BINDING SITE-I, BINDING SITE-II and BINDING SITE-III of FIG. 1, found on, and schematic representation of the complementarity of each of these host target binding sites to VGAM50 RNA, herein designated VGAM RNA, are described hereinbelow with reference to Table 2.

[0668] FIG. 1 further provides a conceptual description of another novel bioinformatically detected viral gene of the present invention, referred to here as Viral Genomic Address Messenger 51 (VGAM51) viral gene, which modulates expression of respective host target genes thereof, the function and utility of which host target genes is known in the art.

[0669] VGAM51 is a novel bioinformatically detected regulatory, non protein coding, viral micro RNA (miRNA) gene. The method by which VGAM51 was detected is described hereinabove with reference to FIGS. 2-8.

[0670] VGAM51 gene, herein designated VGAM GENE, is a viral gene contained in the genome of Vaccinia virus. VGAM51 host target gene, herein designated VGAM HOST TARGET GENE, is a human gene contained in the human genome.

[0671] VGAM51 gene, herein designated VGAM GENE, encodes a VGAM51 precursor RNA, herein designated VGAM PRECURSOR RNA. Similar to other miRNA genes, and unlike most ordinary genes, VGAM51 precursor RNA, herein designated VGAM PRECURSOR RNA, does not encode a protein. A nucleotide sequence identical or highly similar to the nucleotide sequence of VGAM51 precursor RNA is designated SEQ ID:37, and is provided hereinbelow with reference to the sequence listing part. Nucleotide sequence SEQ ID:37 is located at position 6123 relative to the genome of Vaccinia virus.

[0672] VGAM51 precursor RNA, herein designated VGAM PRECURSOR RNA, folds onto itself, forming VGAM51 folded precursor RNA, herein designated VGAM FOLDED PRECURSOR RNA, which has a two-dimensional hairpin structure. As is well known in the art, this hairpin structure, is typical of RNA encoded by miRNA genes, and is due to the fact that the nucleotide sequence of the first half of the RNA encoded by a miRNA gene is an accurate or partial inversed-reversed sequence of the nucleotide sequence of the second half thereof.

[0673] An enzyme complex designated DICER COMPLEX, dices the VGAM51 folded precursor RNA, herein designated VGAM FOLDED PRECURSOR RNA, into VGAM51 RNA, herein designated VGAM RNA, a single stranded ˜22 nt long RNA segment. As is known in the art, dicing of a hairpin structured RNA precursor product into a short ˜22 nt RNA segment is catalyzed by an enzyme complex comprising an enzyme called Dicer together with other necessary proteins. A probable (over 83%) nucleotide sequence of VGAM51 RNA is designated SEQ ID:386, and is provided hereinbelow with reference to the sequence listing part.

[0674] VGAM51 host target gene, herein designated VGAM HOST TARGET GENE, encodes a corresponding messenger RNA, VGAM51 host target RNA, herein designated VGAM HOST TARGET RNA. VGAM51 host target RNA, herein designated VGAM HOST TARGET RNA, comprises three regions, as is typical of mRNA of a protein coding gene: a 5 untranslated region, a protein coding region and a 3 untranslated region, designated 5UTR, PROTEIN CODING and 3UTR respectively.

[0675] VGAM51 RNA, herein designated VGAM RNA, binds complementarily to one or more host target binding sites located in untranslated regions of VGAM51 host target RNA, herein designated VGAM HOST TARGET RNA. This complementary binding is due to the fact that the nucleotide sequence of VGAM51 RNA, herein designated VGAM RNA, is an accurate or a partial inversed-reversed sequence of the nucleotide sequence of each of the host target binding sites. As an illustration, FIG. 1 shows 3 such host target binding sites, designated BINDING SITE I, BINDING SITE II and BINDING SITE III respectively. It is appreciated that the number of host target binding sites shown in FIG. 1 is meant as an illustration only, and is not meant to be limiting VGAM51 RNA, herein designated VGAM RNA, may have a different number of host target binding sites in untranslated regions of a VGAM51 host target RNA, herein designated VGAM HOST TARGET RNA. It is further appreciated that while FIG. 1 depicts host target binding sites in the 3UTR region, this is meant as an example only these host target binding sites may be located in the 3UTR region, the 5UTR region, or in both 3UTR and 5UTR regions.

[0676] The complementary binding of VGAM51 RNA, herein designated VGAM RNA, to host target binding sites on VGAM51 host target RNA, herein designated VGAM HOST TARGET RNA, such as BINDING SITE I, BINDING SITE II and BINDING SITE III, inhibits translation of VGAM51 host target RNA, herein designated VGAM HOST TARGET RNA, into VGAM51 host target protein, herein designated VGAM HOST TARGET PROTEIN. VGAM host target protein is therefore outlined by a broken line.

[0677] It is appreciated that VGAM51 host target gene, herein designated VGAM HOST TARGET GENE, in fact represents a plurality of VGAM51 host target genes. The mRNA of each one of this plurality of VGAM51 host target genes comprises one or more host target binding sites, each having a nucleotide sequence which is at least partly complementary to VGAM51 RNA, herein designated VGAM RNA, and which when bound by VGAM51 RNA, herein designated VGAM RNA, causes inhibition of translation of respective one or more VGAM51 host target proteins.

[0678] It is further appreciated by one skilled in the art that the mode of translational inhibition illustrated by FIG. 1 with specific reference to translational inhibition exerted by VGAM51 gene, herein designated VGAM GENE, on one or more VGAM51 host target gene, herein designated VGAM HOST TARGET GENE, is in fact common to other known non-viral miRNA genes. As mentioned hereinabove with reference to the background section, although a specific complementary binding site has been demonstrated only for some of the known miRNA genes (primarily Lin-4 and Let-7), all other recently discovered miRNA genes are also believed by those skilled in the art to modulate expression of other genes by complementary binding, although specific complementary binding sites of these other miRNA genes have not yet been found (Ruvkun G., Perspective: Glimpses of a tiny RNA world, Science 294, 779 (2001)).

[0679] It is yet further appreciated that a function of VGAM51 is inhibition of expression of host target genes, as part of a novel viral mechanism of attacking a host. Accordingly, utilities of VGAM51 include diagnosis, prevention and treatment of viral infection by Vaccinia virus. Specific functions, and accordingly utilities, of VGAM51 correlate with, and may be deduced from, the identity of the host target genes which VGAM51 binds and inhibits, and the function of these host target genes, as elaborated hereinbelow.

[0680] Nucleotide sequences of the VGAM51 precursor RNA, herein designated VGAM PRECURSOR RNA, and of the diced VGAM51 RNA, herein designated VGAM RNA, and a schematic representation of the secondary folding of VGAM51 folded precursor RNA, herein designated VGAM FOLDED PRECURSOR RNA, of VGAM51 are further described hereinbelow with reference to Table 1.

[0681] Nucleotide sequences of host target binding sites, such as BINDING SITE-I, BINDING SITE-II and BINDING SITE-III of FIG. 1, found on, and schematic representation of the complementarity of each of these host target binding sites to VGAM51 RNA, herein designated VGAM RNA, are described hereinbelow with reference to Table 2.

[0682] FIG. 1 further provides a conceptual description of another novel bioinformatically detected viral gene of the present invention, referred to here as Viral Genomic Address Messenger 52 (VGAM52) viral gene, which modulates expression of respective host target genes thereof, the function and utility of which host target genes is known in the art.

[0683] VGAM52 is a novel bioinformatically detected regulatory, non protein coding, viral micro RNA (miRNA) gene. The method by which VGAM52 was detected is described hereinabove with reference to FIGS. 2-8.

[0684] VGAM52 gene, herein designated VGAM GENE, is a viral gene contained in the genome of Vaccinia virus. VGAM52 host target gene, herein designated VGAM HOST TARGET GENE, is a human gene contained in the human genome.

[0685] VGAM52 gene, herein designated VGAM GENE, encodes a VGAM52 precursor RNA, herein designated VGAM PRECURSOR RNA. Similar to other miRNA genes, and unlike most ordinary genes, VGAM52 precursor RNA, herein designated VGAM PRECURSOR RNA, does not encode a protein. A nucleotide sequence identical or highly similar to the nucleotide sequence of VGAM52 precursor RNA is designated SEQ ID:38, and is provided hereinbelow with reference to the sequence listing part. Nucleotide sequence SEQ ID:38 is located at position 6573 relative to the genome of Vaccinia virus.

[0686] VGAM52 precursor RNA, herein designated VGAM PRECURSOR RNA, folds onto itself, forming VGAM52 folded precursor RNA, herein designated VGAM FOLDED PRECURSOR RNA, which has a two-dimensional hairpin structure. As is well known in the art, this hairpin structure, is typical of RNA encoded by miRNA genes, and is due to the fact that the nucleotide sequence of the first half of the RNA encoded by a miRNA gene is an accurate or partial inversed-reversed sequence of the nucleotide sequence of the second half thereof.

[0687] An enzyme complex designated DICER COMPLEX, dices the VGAM52 folded precursor RNA, herein designated VGAM FOLDED PRECURSOR RNA, into VGAM52 RNA, herein designated VGAM RNA, a single stranded ˜22 nt long RNA segment. As is known in the art, dicing of a hairpin structured RNA precursor product into a short ˜22 nt RNA segment is catalyzed by an enzyme complex comprising an enzyme called Dicer together with other necessary proteins. A probable (over 80%) nucleotide sequence of VGAM52 RNA is designated SEQ ID:387, and is provided hereinbelow with reference to the sequence listing part.

[0688] VGAM52 host target gene, herein designated VGAM HOST TARGET GENE, encodes a corresponding messenger RNA, VGAM52 host target RNA, herein designated VGAM HOST TARGET RNA. VGAM52 host target RNA, herein designated VGAM HOST TARGET RNA, comprises three regions, as is typical of mRNA of a protein coding gene: a 5 untranslated region, a protein coding region and a 3 untranslated region, designated 5UTR, PROTEIN CODING and 3UTR respectively.

[0689] VGAM52 RNA, herein designated VGAM RNA, binds complementarily to one or more host target binding sites located in untranslated regions of VGAM52 host target RNA, herein designated VGAM HOST TARGET RNA. This complementary binding is due to the fact that the nucleotide sequence of VGAM52 RNA, herein designated VGAM RNA, is an accurate or a partial inversed-reversed sequence of the nucleotide sequence of each of the host target binding sites. As an illustration, FIG. 1 shows 3 such host target binding sites, designated BINDING SITE I, BINDING SITE II and BINDING SITE III respectively. It is appreciated that the number of host target binding sites shown in FIG. 1 is meant as an illustration only, and is not meant to be limiting VGAM52 RNA, herein designated VGAM RNA, may have a different number of host target binding sites in untranslated regions of a VGAM52 host target RNA, herein designated VGAM HOST TARGET RNA. It is further appreciated that while FIG. 1 depicts host target binding sites in the 3UTR region, this is meant as an example only these host target binding sites may be located in the 3UTR region, the 5UTR region, or in both 3UTR and 5UTR regions.

[0690] The complementary binding of VGAM52 RNA, herein designated VGAM RNA, to host target binding sites on VGAM52 host target RNA, herein designated VGAM HOST TARGET RNA, such as BINDING SITE I, BINDING SITE II and BINDING SITE III, inhibits translation of VGAM52 host target RNA, herein designated VGAM HOST TARGET RNA, into VGAM52 host target protein, herein designated VGAM HOST TARGET PROTEIN. VGAM host target protein is therefore outlined by a broken line.

[0691] It is appreciated that VGAM52 host target gene, herein designated VGAM HOST TARGET GENE, in fact represents a plurality of VGAM52 host target genes. The mRNA of each one of this plurality of VGAM52 host target genes comprises one or more host target binding sites, each having a nucleotide sequence which is at least partly complementary to VGAM52 RNA, herein designated VGAM RNA, and which when bound by VGAM52 RNA, herein designated VGAM RNA, causes inhibition of translation of respective one or more VGAM52 host target proteins.

[0692] It is further appreciated by one skilled in the art that the mode of translational inhibition illustrated by FIG. 1 with specific reference to translational inhibition exerted by VGAM52 gene, herein designated VGAM GENE, on one or more VGAM52 host target gene, herein designated VGAM HOST TARGET GENE, is in fact common to other known non-viral miRNA genes. As mentioned hereinabove with reference to the background section, although a specific complementary binding site has been demonstrated only for some of the known miRNA genes (primarily Lin-4 and Let-7), all other recently discovered miRNA genes are also believed by those skilled in the art to modulate expression of other genes by complementary binding, although specific complementary binding sites of these other miRNA genes have not yet been found (Ruvkun G., Perspective: Glimpses of a tiny RNA world, Science 294, 779 (2001)).

[0693] It is yet further appreciated that a function of VGAM52 is inhibition of expression of host target genes, as part of a novel viral mechanism of attacking a host. Accordingly, utilities of VGAM52 include diagnosis, prevention and treatment of viral infection by Vaccinia virus. Specific functions, and accordingly utilities, of VGAM52 correlate with, and may be deduced from, the identity of the host target genes which VGAM52 binds and inhibits, and the function of these host target genes, as elaborated hereinbelow.

[0694] Nucleotide sequences of the VGAM52 precursor RNA, herein designated VGAM PRECURSOR RNA, and of the diced VGAM52 RNA, herein designated VGAM RNA, and a schematic representation of the secondary folding of VGAM52 folded precursor RNA, herein designated VGAM FOLDED PRECURSOR RNA, of VGAM52 are further described hereinbelow with reference to Table 1.

[0695] Nucleotide sequences of host target binding sites, such as BINDING SITE-I, BINDING SITE-II and BINDING SITE-III of FIG. 1, found on, and schematic representation of the complementarity of each of these host target binding sites to VGAM52 RNA, herein designated VGAM RNA, are described hereinbelow with reference to Table 2.

[0696] FIG. 1 further provides a conceptual description of another novel bioinformatically detected viral gene of the present invention, referred to here as Viral Genomic Address Messenger 53 (VGAM53) viral gene, which modulates expression of respective host target genes thereof, the function and utility of which host target genes is known in the art.

[0697] VGAM53 is a novel bioinformatically detected regulatory, non protein coding, viral micro RNA (miRNA) gene. The method by which VGAM53 was detected is described hereinabove with reference to FIGS. 2-8.

[0698] VGAM53 gene, herein designated VGAM GENE, is a viral gene contained in the genome of Vaccinia virus. VGAM53 host target gene, herein designated VGAM HOST TARGET GENE, is a human gene contained in the human genome.

[0699] VGAM53 gene, herein designated VGAM GENE, encodes a VGAM53 precursor RNA, herein designated VGAM PRECURSOR RNA. Similar to other miRNA genes, and unlike most ordinary genes, VGAM53 precursor RNA, herein designated VGAM PRECURSOR RNA, does not encode a protein. A nucleotide sequence identical or highly similar to the nucleotide sequence of VGAM53 precursor RNA is designated SEQ ID:39, and is provided hereinbelow with reference to the sequence listing part. Nucleotide sequence SEQ ID:39 is located at position 5257 relative to the genome of Vaccinia virus.

[0700] VGAM53 precursor RNA, herein designated VGAM PRECURSOR RNA, folds onto itself, forming VGAM53 folded precursor RNA, herein designated VGAM FOLDED PRECURSOR RNA, which has a two-dimensional hairpin structure. As is well known in the art, this hairpin structure, is typical of RNA encoded by miRNA genes, and is due to the fact that the nucleotide sequence of the first half of the RNA encoded by a miRNA gene is an accurate or partial inversed-reversed sequence of the nucleotide sequence of the second half thereof.

[0701] An enzyme complex designated DICER COMPLEX, dices the VGAM53 folded precursor RNA, herein designated VGAM FOLDED PRECURSOR RNA, into VGAM53 RNA, herein designated VGAM RNA, a single stranded ˜22 nt long RNA segment. As is known in the art, dicing of a hairpin structured RNA precursor product into a short ˜22 nt RNA segment is catalyzed by an enzyme complex comprising an enzyme called Dicer together with other necessary proteins. A probable (over 83%) nucleotide sequence of VGAM53 RNA is designated SEQ ID:388, and is provided hereinbelow with reference to the sequence listing part.

[0702] VGAM53 host target gene, herein designated VGAM HOST TARGET GENE, encodes a corresponding messenger RNA, VGAM53 host target RNA, herein designated VGAM HOST TARGET RNA. VGAM53 host target RNA, herein designated VGAM HOST TARGET RNA, comprises three regions, as is typical of mRNA of a protein coding gene: a 5 untranslated region, a protein coding region and a 3 untranslated region, designated 5UTR, PROTEIN CODING and 3UTR respectively.

[0703] VGAM53 RNA, herein designated VGAM RNA, binds complementarily to one or more host target binding sites located in untranslated regions of VGAM53 host target RNA, herein designated VGAM HOST TARGET RNA. This complementary binding is due to the fact that the nucleotide sequence of VGAM53 RNA, herein designated VGAM RNA, is an accurate or a partial inversed-reversed sequence of the nucleotide sequence of each of the host target binding sites. As an illustration, FIG. 1 shows 3 such host target binding sites, designated BINDING SITE I, BINDING SITE II and BINDING SITE III respectively. It is appreciated that the number of host target binding sites shown in FIG. 1 is meant as an illustration only, and is not meant to be limiting VGAM53 RNA, herein designated VGAM RNA, may have a different number of host target binding sites in untranslated regions of a VGAM53 host target RNA, herein designated VGAM HOST TARGET RNA. It is further appreciated that while FIG. 1 depicts host target binding sites in the 3UTR region, this is meant as an example only these host target binding sites may be located in the 3UTR region, the 5UTR region, or in both 3UTR and 5UTR regions.

[0704] The complementary binding of VGAM53 RNA, herein designated VGAM RNA, to host target binding sites on VGAM53 host target RNA, herein designated VGAM HOST TARGET RNA, such as BINDING SITE I, BINDING SITE II and BINDING SITE III, inhibits translation of VGAM53 host target RNA, herein designated VGAM HOST TARGET RNA, into VGAM53 host target protein, herein designated VGAM HOST TARGET PROTEIN. VGAM host target protein is therefore outlined by a broken line.

[0705] It is appreciated that VGAM53 host target gene, herein designated VGAM HOST TARGET GENE, in fact represents a plurality of VGAM53 host target genes. The mRNA of each one of this plurality of VGAM53 host target genes comprises one or more host target binding sites, each having a nucleotide sequence which is at least partly complementary to VGAM53 RNA, herein designated VGAM RNA, and which when bound by VGAM53 RNA, herein designated VGAM RNA, causes inhibition of translation of respective one or more VGAM53 host target proteins.

[0706] It is further appreciated by one skilled in the art that the mode of translational inhibition illustrated by FIG. 1 with specific reference to translational inhibition exerted by VGAM53 gene, herein designated VGAM GENE, on one or more VGAM53 host target gene, herein designated VGAM HOST TARGET GENE, is in fact common to other known non-viral miRNA genes. As mentioned hereinabove with reference to the background section, although a specific complementary binding site has been demonstrated only for some of the known miRNA genes (primarily Lin-4 and Let-7), all other recently discovered miRNA genes are also believed by those skilled in the art to modulate expression of other genes by complementary binding, although specific complementary binding sites of these other miRNA genes have not yet been found (Ruvkun G., Perspective: Glimpses of a tiny RNA world, Science 294, 779 (2001)).

[0707] It is yet further appreciated that a function of VGAM53 is inhibition of expression of host target genes, as part of a novel viral mechanism of attacking a host. Accordingly, utilities of VGAM53 include diagnosis, prevention and treatment of viral infection by Vaccinia virus. Specific functions, and accordingly utilities, of VGAM53 correlate with, and may be deduced from, the identity of the host target genes which VGAM53 binds and inhibits, and the function of these host target genes, as elaborated hereinbelow.

[0708] Nucleotide sequences of the VGAM53 precursor RNA, herein designated VGAM PRECURSOR RNA, and of the diced VGAM53 RNA, herein designated VGAM RNA, and a schematic representation of the secondary folding of VGAM53 folded precursor RNA, herein designated VGAM FOLDED PRECURSOR RNA, of VGAM53 are further described hereinbelow with reference to Table 1.

[0709] Nucleotide sequences of host target binding sites, such as BINDING SITE-I, BINDING SITE-II and BINDING SITE-III of FIG. 1, found on, and schematic representation of the complementarity of each of these host target binding sites to VGAM53 RNA, herein designated VGAM RNA, are described hereinbelow with reference to Table 2.

[0710] FIG. 1 further provides a conceptual description of another novel bioinformatically detected viral gene of the present invention, referred to here as Viral Genomic Address Messenger 54 (VGAM54) viral gene, which modulates expression of respective host target genes thereof, the function and utility of which host target genes is known in the art.

[0711] VGAM54 is a novel bioinformatically detected regulatory, non protein coding, viral micro RNA (miRNA) gene. The method by which VGAM54 was detected is described hereinabove with reference to FIGS. 2-8.

[0712] VGAM54 gene, herein designated VGAM GENE, is a viral gene contained in the genome of Vaccinia virus. VGAM54 host target gene, herein designated VGAM HOST TARGET GENE, is a human gene contained in the human genome.

[0713] VGAM54 gene, herein designated VGAM GENE, encodes a VGAM54 precursor RNA, herein designated VGAM PRECURSOR RNA. Similar to other miRNA genes, and unlike most ordinary genes, VGAM54 precursor RNA, herein designated VGAM PRECURSOR RNA, does not encode a protein. A nucleotide sequence identical or highly similar to the nucleotide sequence of VGAM54 precursor RNA is designated SEQ ID:40, and is provided hereinbelow with reference to the sequence listing part. Nucleotide sequence SEQ ID:40 is located at position 4867 relative to the genome of Vaccinia virus.

[0714] VGAM54 precursor RNA, herein designated VGAM PRECURSOR RNA, folds onto itself, forming VGAM54 folded precursor RNA, herein designated VGAM FOLDED PRECURSOR RNA, which has a two-dimensional hairpin structure. As is well known in the art, this hairpin structure, is typical of RNA encoded by miRNA genes, and is due to the fact that the nucleotide sequence of the first half of the RNA encoded by a miRNA gene is an accurate or partial inversed-reversed sequence of the nucleotide sequence of the second half thereof.

[0715] An enzyme complex designated DICER COMPLEX, dices the VGAM54 folded precursor RNA, herein designated VGAM FOLDED PRECURSOR RNA, into VGAM54 RNA, herein designated VGAM RNA, a single stranded ˜22 nt long RNA segment. As is known in the art, dicing of a hairpin structured RNA precursor product into a short ˜22 nt RNA segment is catalyzed by an enzyme complex comprising an enzyme called Dicer together with other necessary proteins. A probable (over 82%) nucleotide sequence of VGAM54 RNA is designated SEQ ID:389, and is provided hereinbelow with reference to the sequence listing part.

[0716] VGAM54 host target gene, herein designated VGAM HOST TARGET GENE, encodes a corresponding messenger RNA, VGAM54 host target RNA, herein designated VGAM HOST TARGET RNA. VGAM54 host target RNA, herein designated VGAM HOST TARGET RNA, comprises three regions, as is typical of mRNA of a protein coding gene: a 5 untranslated region, a protein coding region and a 3 untranslated region, designated 5UTR, PROTEIN CODING and 3UTR respectively.

[0717] VGAM54 RNA, herein designated VGAM RNA, binds complementarily to one or more host target binding sites located in untranslated regions of VGAM54 host target RNA, herein designated VGAM HOST TARGET RNA. This complementary binding is due to the fact that the nucleotide sequence of VGAM54 RNA, herein designated VGAM RNA, is an accurate or a partial inversed-reversed sequence of the nucleotide sequence of each of the host target binding sites. As an illustration, FIG. 1 shows 3 such host target binding sites, designated BINDING SITE I, BINDING SITE II and BINDING SITE III respectively. It is appreciated that the number of host target binding sites shown in FIG. 1 is meant as an illustration only, and is not meant to be limiting VGAM54 RNA, herein designated VGAM RNA, may have a different number of host target binding sites in untranslated regions of a VGAM54 host target RNA, herein designated VGAM HOST TARGET RNA. It is further appreciated that while FIG. 1 depicts host target binding sites in the 3UTR region, this is meant as an example only these host target binding sites may be located in the 3UTR region, the 5UTR region, or in both 3UTR and 5UTR regions.

[0718] The complementary binding of VGAM54 RNA, herein designated VGAM RNA, to host target binding sites on VGAM54 host target RNA, herein designated VGAM HOST TARGET RNA, such as BINDING SITE I, BINDING SITE II and BINDING SITE III, inhibits translation of VGAM54 host target RNA, herein designated VGAM HOST TARGET RNA, into VGAM54 host target protein, herein designated VGAM HOST TARGET PROTEIN. VGAM host target protein is therefore outlined by a broken line.

[0719] It is appreciated that VGAM54 host target gene, herein designated VGAM HOST TARGET GENE, in fact represents a plurality of VGAM54 host target genes. The mRNA of each one of this plurality of VGAM54 host target genes comprises one or more host target binding sites, each having a nucleotide sequence which is at least partly complementary to VGAM54 RNA, herein designated VGAM RNA, and which when bound by VGAM54 RNA, herein designated VGAM RNA, causes inhibition of translation of respective one or more VGAM54 host target proteins.

[0720] It is further appreciated by one skilled in the art that the mode of translational inhibition illustrated by FIG. 1 with specific reference to translational inhibition exerted by VGAM54 gene, herein designated VGAM GENE, on one or more VGAM54 host target gene, herein designated VGAM HOST TARGET GENE, is in fact common to other known non-viral miRNA genes. As mentioned hereinabove with reference to the background section, although a specific complementary binding site has been demonstrated only for some of the known miRNA genes (primarily Lin-4 and Let-7), all other recently discovered miRNA genes are also believed by those skilled in the art to modulate expression of other genes by complementary binding, although specific complementary binding sites of these other miRNA genes have not yet been found (Ruvkun G., Perspective: Glimpses of a tiny RNA world, Science 294, 779 (2001)).

[0721] It is yet further appreciated that a function of VGAM54 is inhibition of expression of host target genes, as part of a novel viral mechanism of attacking a host. Accordingly, utilities of VGAM54 include diagnosis, prevention and treatment of viral infection by Vaccinia virus. Specific functions, and accordingly utilities, of VGAM54 correlate with, and may be deduced from, the identity of the host target genes which VGAM54 binds and inhibits, and the function of these host target genes, as elaborated hereinbelow.

[0722] Nucleotide sequences of the VGAM54 precursor RNA, herein designated VGAM PRECURSOR RNA, and of the diced VGAM54 RNA, herein designated VGAM RNA, and a schematic representation of the secondary folding of VGAM54 folded precursor RNA, herein designated VGAM FOLDED PRECURSOR RNA, of VGAM54 are further described hereinbelow with reference to Table 1.

[0723] Nucleotide sequences of host target binding sites, such as BINDING SITE-I, BINDING SITE-II and BINDING SITE-III of FIG. 1, found on, and schematic representation of the complementarity of each of these host target binding sites to VGAM54 RNA, herein designated VGAM RNA, are described hereinbelow with reference to Table 2.

[0724] FIG. 1 further provides a conceptual description of another novel bioinformatically detected viral gene of the present invention, referred to here as Viral Genomic Address Messenger 55 (VGAM55) viral gene, which modulates expression of respective host target genes thereof, the function and utility of which host target genes is known in the art.

[0725] VGAM55 is a novel bioinformatically detected regulatory, non protein coding, viral micro RNA (miRNA) gene. The method by which VGAM55 was detected is described hereinabove with reference to FIGS. 2-8.

[0726] VGAM55 gene, herein designated VGAM GENE, is a viral gene contained in the genome of Vaccinia virus. VGAM55 host target gene, herein designated VGAM HOST TARGET GENE, is a human gene contained in the human genome.

[0727] VGAM55 gene, herein designated VGAM GENE, encodes a VGAM55 precursor RNA, herein designated VGAM PRECURSOR RNA. Similar to other miRNA genes, and unlike most ordinary genes, VGAM55 precursor RNA, herein designated VGAM PRECURSOR RNA, does not encode a protein. A nucleotide sequence identical or highly similar to the nucleotide sequence of VGAM55 precursor RNA is designated SEQ ID:41, and is provided hereinbelow with reference to the sequence listing part. Nucleotide sequence SEQ ID:41 is located at position 185510 relative to the genome of Vaccinia virus.

[0728] VGAM55 precursor RNA, herein designated VGAM PRECURSOR RNA, folds onto itself, forming VGAM55 folded precursor RNA, herein designated VGAM FOLDED PRECURSOR RNA, which has a two-dimensional hairpin structure. As is well known in the art, this hairpin structure, is typical of RNA encoded by miRNA genes, and is due to the fact that the nucleotide sequence of the first half of the RNA encoded by a miRNA gene is an accurate or partial inversed-reversed sequence of the nucleotide sequence of the second half thereof.

[0729] An enzyme complex designated DICER COMPLEX, dices the VGAM55 folded precursor RNA, herein designated VGAM FOLDED PRECURSOR RNA, into VGAM55 RNA, herein designated VGAM RNA, a single stranded ˜22 nt long RNA segment. As is known in the art, dicing of a hairpin structured RNA precursor product into a short ˜22 nt RNA segment is catalyzed by an enzyme complex comprising an enzyme called Dicer together with other necessary proteins. A probable (over 87%) nucleotide sequence of VGAM55 RNA is designated SEQ ID:390, and is provided hereinbelow with reference to the sequence listing part.

[0730] VGAM55 host target gene, herein designated VGAM HOST TARGET GENE, encodes a corresponding messenger RNA, VGAM55 host target RNA, herein designated VGAM HOST TARGET RNA. VGAM55 host target RNA, herein designated VGAM HOST TARGET RNA, comprises three regions, as is typical of mRNA of a protein coding gene: a 5 untranslated region, a protein coding region and a 3 untranslated region, designated 5UTR, PROTEIN CODING and 3UTR respectively.

[0731] VGAM55 RNA, herein designated VGAM RNA, binds complementarily to one or more host target binding sites located in untranslated regions of VGAM55 host target RNA, herein designated VGAM HOST TARGET RNA. This complementary binding is due to the fact that the nucleotide sequence of VGAM55 RNA, herein designated VGAM RNA, is an accurate or a partial inversed-reversed sequence of the nucleotide sequence of each of the host target binding sites. As an illustration, FIG. 1 shows 3 such host target binding sites, designated BINDING SITE I, BINDING SITE II and BINDING SITE III respectively. It is appreciated that the number of host target binding sites shown in FIG. 1 is meant as an illustration only, and is not meant to be limiting VGAM55 RNA, herein designated VGAM RNA, may have a different number of host target binding sites in untranslated regions of a VGAM55 host target RNA, herein designated VGAM HOST TARGET RNA. It is further appreciated that while FIG. 1 depicts host target binding sites in the 3UTR region, this is meant as an example only these host target binding sites may be located in the 3UTR region, the 5UTR region, or in both 3UTR and 5UTR regions.

[0732] The complementary binding of VGAM55 RNA, herein designated VGAM RNA, to host target binding sites on VGAM55 host target RNA, herein designated VGAM HOST TARGET RNA, such as BINDING SITE I, BINDING SITE II and BINDING SITE III, inhibits translation of VGAM55 host target RNA, herein designated VGAM HOST TARGET RNA, into VGAM55 host target protein, herein designated VGAM HOST TARGET PROTEIN. VGAM host target protein is therefore outlined by a broken line.

[0733] It is appreciated that VGAM55 host target gene, herein designated VGAM HOST TARGET GENE, in fact represents a plurality of VGAM55 host target genes. The mRNA of each one of this plurality of VGAM55 host target genes comprises one or more host target binding sites, each having a nucleotide sequence which is at least partly complementary to VGAM55 RNA, herein designated VGAM RNA, and which when bound by VGAM55 RNA, herein designated VGAM RNA, causes inhibition of translation of respective one or more VGAM55 host target proteins.

[0734] It is further appreciated by one skilled in the art that the mode of translational inhibition illustrated by FIG. 1 with specific reference to translational inhibition exerted by VGAM55 gene, herein designated VGAM GENE, on one or more VGAM55 host target gene, herein designated VGAM HOST TARGET GENE, is in fact common to other known non-viral miRNA genes. As mentioned hereinabove with reference to the background section, although a specific complementary binding site has been demonstrated only for some of the known miRNA genes (primarily Lin-4 and Let-7), all other recently discovered miRNA genes are also believed by those skilled in the art to modulate expression of other genes by complementary binding, although specific complementary binding sites of these other miRNA genes have not yet been found (Ruvkun G., Perspective: Glimpses of a tiny RNA world, Science 294, 779 (2001)).

[0735] It is yet further appreciated that a function of VGAM55 is inhibition of expression of host target genes, as part of a novel viral mechanism of attacking a host. Accordingly, utilities of VGAM55 include diagnosis, prevention and treatment of viral infection by Vaccinia virus. Specific functions, and accordingly utilities, of VGAM55 correlate with, and may be deduced from, the identity of the host target genes which VGAM55 binds and inhibits, and the function of these host target genes, as elaborated hereinbelow.

[0736] Nucleotide sequences of the VGAM55 precursor RNA, herein designated VGAM PRECURSOR RNA, and of the diced VGAM55 RNA, herein designated VGAM RNA, and a schematic representation of the secondary folding of VGAM55 folded precursor RNA, herein designated VGAM FOLDED PRECURSOR RNA, of VGAM55 are further described hereinbelow with reference to Table 1.

[0737] Nucleotide sequences of host target binding sites, such as BINDING SITE-I, BINDING SITE-II and BINDING SITE-III of FIG. 1, found on, and schematic representation of the complementarity of each of these host target binding sites to VGAM55 RNA, herein designated VGAM RNA, are described hereinbelow with reference to Table 2.

[0738] FIG. 1 further provides a conceptual description of another novel bioinformatically detected viral gene of the present invention, referred to here as Viral Genomic Address Messenger 56 (VGAM56) viral gene, which modulates expression of respective host target genes thereof, the function and utility of which host target genes is known in the art.

[0739] VGAM56 is a novel bioinformatically detected regulatory, non protein coding, viral micro RNA (miRNA) gene. The method by which VGAM56 was detected is described hereinabove with reference to FIGS. 2-8.

[0740] VGAM56 gene, herein designated VGAM GENE, is a viral gene contained in the genome of Vaccinia virus. VGAM56 host target gene, herein designated VGAM HOST TARGET GENE, is a human gene contained in the human genome.

[0741] VGAM56 gene, herein designated VGAM GENE, encodes a VGAM56 precursor RNA, herein designated VGAM PRECURSOR RNA. Similar to other miRNA genes, and unlike most ordinary genes, VGAM56 precursor RNA, herein designated VGAM PRECURSOR RNA, does not encode a protein. A nucleotide sequence identical or highly similar to the nucleotide sequence of VGAM56 precursor RNA is designated SEQ ID:42, and is provided hereinbelow with reference to the sequence listing part. Nucleotide sequence SEQ ID:42 is located at position 183817 relative to the genome of Vaccinia virus.

[0742] VGAM56 precursor RNA, herein designated VGAM PRECURSOR RNA, folds onto itself, forming VGAM56 folded precursor RNA, herein designated VGAM FOLDED PRECURSOR RNA, which has a two-dimensional hairpin structure. As is well known in the art, this hairpin structure, is typical of RNA encoded by miRNA genes, and is due to the fact that the nucleotide sequence of the first half of the RNA encoded by a miRNA gene is an accurate or partial inversed-reversed sequence of the nucleotide sequence of the second half thereof.

[0743] An enzyme complex designated DICER COMPLEX, dices the VGAM56 folded precursor RNA, herein designated VGAM FOLDED PRECURSOR RNA, into VGAM56 RNA, herein designated VGAM RNA, a single stranded ˜22 nt long RNA segment. As is known in the art, dicing of a hairpin structured RNA precursor product into a short ˜22 nt RNA segment is catalyzed by an enzyme complex comprising an enzyme called Dicer together with other necessary proteins. A probable (over 80%) nucleotide sequence of VGAM56 RNA is designated SEQ ID:391, and is provided hereinbelow with reference to the sequence listing part.

[0744] VGAM56 host target gene, herein designated VGAM HOST TARGET GENE, encodes a corresponding messenger RNA, VGAM56 host target RNA, herein designated VGAM HOST TARGET RNA. VGAM56 host target RNA, herein designated VGAM HOST TARGET RNA, comprises three regions, as is typical of mRNA of a protein coding gene: a 5 untranslated region, a protein coding region and a 3 untranslated region, designated 5UTR, PROTEIN CODING and 3UTR respectively.

[0745] VGAM56 RNA, herein designated VGAM RNA, binds complementarily to one or more host target binding sites located in untranslated regions of VGAM56 host target RNA, herein designated VGAM HOST TARGET RNA. This complementary binding is due to the fact that the nucleotide sequence of VGAM56 RNA, herein designated VGAM RNA, is an accurate or a partial inversed-reversed sequence of the nucleotide sequence of each of the host target binding sites. As an illustration, FIG. 1 shows 3 such host target binding sites, designated BINDING SITE I, BINDING SITE II and BINDING SITE III respectively. It is appreciated that the number of host target binding sites shown in FIG. 1 is meant as an illustration only, and is not meant to be limiting VGAM56 RNA, herein designated VGAM RNA, may have a different number of host target binding sites in untranslated regions of a VGAM56 host target RNA, herein designated VGAM HOST TARGET RNA. It is further appreciated that while FIG. 1 depicts host target binding sites in the 3UTR region, this is meant as an example only these host target binding sites may be located in the 3UTR region, the 5UTR region, or in both 3UTR and 5UTR regions.

[0746] The complementary binding of VGAM56 RNA, herein designated VGAM RNA, to host target binding sites on VGAM56 host target RNA, herein designated VGAM HOST TARGET RNA, such as BINDING SITE I, BINDING SITE II and BINDING SITE III, inhibits translation of VGAM56 host target RNA, herein designated VGAM HOST TARGET RNA, into VGAM56 host target protein, herein designated VGAM HOST TARGET PROTEIN. VGAM host target protein is therefore outlined by a broken line.

[0747] It is appreciated that VGAM56 host target gene, herein designated VGAM HOST TARGET GENE, in fact represents a plurality of VGAM56 host target genes. The mRNA of each one of this plurality of VGAM56 host target genes comprises one or more host target binding sites, each having a nucleotide sequence which is at least partly complementary to VGAM56 RNA, herein designated VGAM RNA, and which when bound by VGAM56 RNA, herein designated VGAM RNA, causes inhibition of translation of respective one or more VGAM56 host target proteins.

[0748] It is further appreciated by one skilled in the art that the mode of translational inhibition illustrated by FIG. 1 with specific reference to translational inhibition exerted by VGAM56 gene, herein designated VGAM GENE, on one or more VGAM56 host target gene, herein designated VGAM HOST TARGET GENE, is in fact common to other known non-viral miRNA genes. As mentioned hereinabove with reference to the background section, although a specific complementary binding site has been demonstrated only for some of the known miRNA genes (primarily Lin-4 and Let-7), all other recently discovered miRNA genes are also believed by those skilled in the art to modulate expression of other genes by complementary binding, although specific complementary binding sites of these other miRNA genes have not yet been found (Ruvkun G., Perspective: Glimpses of a tiny RNA world, Science 294, 779 (2001)).

[0749] It is yet further appreciated that a function of VGAM56 is inhibition of expression of host target genes, as part of a novel viral mechanism of attacking a host. Accordingly, utilities of VGAM56 include diagnosis, prevention and treatment of viral infection by Vaccinia virus. Specific functions, and accordingly utilities, of VGAM56 correlate with, and may be deduced from, the identity of the host target genes which VGAM56 binds and inhibits, and the function of these host target genes, as elaborated hereinbelow.

[0750] Nucleotide sequences of the VGAM56 precursor RNA, herein designated VGAM PRECURSOR RNA, and of the diced VGAM56 RNA, herein designated VGAM RNA, and a schematic representation of the secondary folding of VGAM56 folded precursor RNA, herein designated VGAM FOLDED PRECURSOR RNA, of VGAM56 are further described hereinbelow with reference to Table 1.

[0751] Nucleotide sequences of host target binding sites, such as BINDING SITE-I, BINDING SITE-II and BINDING SITE-III of FIG. 1, found on, and schematic representation of the complementarity of each of these host target binding sites to VGAM56 RNA, herein designated VGAM RNA, are described hereinbelow with reference to Table 2.

[0752] FIG. 1 further provides a conceptual description of another novel bioinformatically detected viral gene of the present invention, referred to here as Viral Genomic Address Messenger 57 (VGAM57) viral gene, which modulates expression of respective host target genes thereof, the function and utility of which host target genes is known in the art.

[0753] VGAM57 is a novel bioinformatically detected regulatory, non protein coding, viral micro RNA (miRNA) gene. The method by which VGAM57 was detected is described hereinabove with reference to FIGS. 2-8.

[0754] VGAM57 gene, herein designated VGAM GENE, is a viral gene contained in the genome of Vaccinia virus. VGAM57 host target gene, herein designated VGAM HOST TARGET GENE, is a human gene contained in the human genome.

[0755] VGAM57 gene, herein designated VGAM GENE, encodes a VGAM57 precursor RNA, herein designated VGAM PRECURSOR RNA. Similar to other miRNA genes, and unlike most ordinary genes, VGAM57 precursor RNA, herein designated VGAM PRECURSOR RNA, does not encode a protein. A nucleotide sequence identical or highly similar to the nucleotide sequence of VGAM57 precursor RNA is designated SEQ ID:43, and is provided hereinbelow with reference to the sequence listing part. Nucleotide sequence SEQ ID:43 is located at position 183735 relative to the genome of Vaccinia virus.

[0756] VGAM57 precursor RNA, herein designated VGAM PRECURSOR RNA, folds onto itself, forming VGAM57 folded precursor RNA, herein designated VGAM FOLDED PRECURSOR RNA, which has a two-dimensional hairpin structure. As is well known in the art, this hairpin structure, is typical of RNA encoded by miRNA genes, and is due to the fact that the nucleotide sequence of the first half of the RNA encoded by a miRNA gene is an accurate or partial inversed-reversed sequence of the nucleotide sequence of the second half thereof.

[0757] An enzyme complex designated DICER COMPLEX, dices the VGAM57 folded precursor RNA, herein designated VGAM FOLDED PRECURSOR RNA, into VGAM57 RNA, herein designated VGAM RNA, a single stranded ˜22 nt long RNA segment. As is known in the art, dicing of a hairpin structured RNA precursor product into a short ˜22 nt RNA segment is catalyzed by an enzyme complex comprising an enzyme called Dicer together with other necessary proteins. A probable (over 71%) nucleotide sequence of VGAM57 RNA is designated SEQ ID:392, and is provided hereinbelow with reference to the sequence listing part.

[0758] VGAM57 host target gene, herein designated VGAM HOST TARGET GENE, encodes a corresponding messenger RNA, VGAM57 host target RNA, herein designated VGAM HOST TARGET RNA. VGAM57 host target RNA, herein designated VGAM HOST TARGET RNA, comprises three regions, as is typical of mRNA of a protein coding gene: a 5 untranslated region, a protein coding region and a 3 untranslated region, designated 5UTR, PROTEIN CODING and 3UTR respectively.

[0759] VGAM57 RNA, herein designated VGAM RNA, binds complementarily to one or more host target binding sites located in untranslated regions of VGAM57 host target RNA, herein designated VGAM HOST TARGET RNA. This complementary binding is due to the fact that the nucleotide sequence of VGAM57 RNA, herein designated VGAM RNA, is an accurate or a partial inversed-reversed sequence of the nucleotide sequence of each of the host target binding sites. As an illustration, FIG. 1 shows 3 such host target binding sites, designated BINDING SITE I, BINDING SITE II and BINDING SITE III respectively. It is appreciated that the number of host target binding sites shown in FIG. 1 is meant as an illustration only, and is not meant to be limiting VGAM57 RNA, herein designated VGAM RNA, may have a different number of host target binding sites in untranslated regions of a VGAM57 host target RNA, herein designated VGAM HOST TARGET RNA. It is further appreciated that while FIG. 1 depicts host target binding sites in the 3UTR region, this is meant as an example only these host target binding sites may be located in the 3UTR region, the 5UTR region, or in both 3UTR and 5UTR regions.

[0760] The complementary binding of VGAM57 RNA, herein designated VGAM RNA, to host target binding sites on VGAM57 host target RNA, herein designated VGAM HOST TARGET RNA, such as BINDING SITE I, BINDING SITE II and BINDING SITE III, inhibits translation of VGAM57 host target RNA, herein designated VGAM HOST TARGET RNA, into VGAM57 host target protein, herein designated VGAM HOST TARGET PROTEIN. VGAM host target protein is therefore outlined by a broken line.

[0761] It is appreciated that VGAM57 host target gene, herein designated VGAM HOST TARGET GENE, in fact represents a plurality of VGAM57 host target genes. The mRNA of each one of this plurality of VGAM57 host target genes comprises one or more host target binding sites, each having a nucleotide sequence which is at least partly complementary to VGAM57 RNA, herein designated VGAM RNA, and which when bound by VGAM57 RNA, herein designated VGAM RNA, causes inhibition of translation of respective one or more VGAM57 host target proteins.

[0762] It is further appreciated by one skilled in the art that the mode of translational inhibition illustrated by FIG. 1 with specific reference to translational inhibition exerted by VGAM57 gene, herein designated VGAM GENE, on one or more VGAM57 host target gene, herein designated VGAM HOST TARGET GENE, is in fact common to other known non-viral miRNA genes. As mentioned hereinabove with reference to the background section, although a specific complementary binding site has been demonstrated only for some of the known miRNA genes (primarily Lin-4 and Let-7), all other recently discovered miRNA genes are also believed by those skilled in the art to modulate expression of other genes by complementary binding, although specific complementary binding sites of these other miRNA genes have not yet been found (Ruvkun G., Perspective: Glimpses of a tiny RNA world, Science 294, 779 (2001)).

[0763] It is yet further appreciated that a function of VGAM57 is inhibition of expression of host target genes, as part of a novel viral mechanism of attacking a host. Accordingly, utilities of VGAM57 include diagnosis, prevention and treatment of viral infection by Vaccinia virus. Specific functions, and accordingly utilities, of VGAM57 correlate with, and may be deduced from, the identity of the host target genes which VGAM57 binds and inhibits, and the function of these host target genes, as elaborated hereinbelow.

[0764] Nucleotide sequences of the VGAM57 precursor RNA, herein designated VGAM PRECURSOR RNA, and of the diced VGAM57 RNA, herein designated VGAM RNA, and a schematic representation of the secondary folding of VGAM57 folded precursor RNA, herein designated VGAM FOLDED PRECURSOR RNA, of VGAM57 are further described hereinbelow with reference to Table 1.

[0765] Nucleotide sequences of host target binding sites, such as BINDING SITE-I, BINDING SITE-II and BINDING SITE-III of FIG. 1, found on, and schematic representation of the complementarity of each of these host target binding sites to VGAM57 RNA, herein designated VGAM RNA, are described hereinbelow with reference to Table 2.

[0766] FIG. 1 further provides a conceptual description of another novel bioinformatically detected viral gene of the present invention, referred to here as Viral Genomic Address Messenger 58 (VGAM58) viral gene, which modulates expression of respective host target genes thereof, the function and utility of which host target genes is known in the art.

[0767] VGAM58 is a novel bioinformatically detected regulatory, non protein coding, viral micro RNA (miRNA) gene. The method by which VGAM58 was detected is described hereinabove with reference to FIGS. 2-8.

[0768] VGAM58 gene, herein designated VGAM GENE, is a viral gene contained in the genome of Vaccinia virus. VGAM58 host target gene, herein designated VGAM HOST TARGET GENE, is a human gene contained in the human genome.

[0769] VGAM58 gene, herein designated VGAM GENE, encodes a VGAM58 precursor RNA, herein designated VGAM PRECURSOR RNA. Similar to other miRNA genes, and unlike most ordinary genes, VGAM58 precursor RNA, herein designated VGAM PRECURSOR RNA, does not encode a protein. A nucleotide sequence identical or highly similar to the nucleotide sequence of VGAM58 precursor RNA is designated SEQ ID:44, and is provided hereinbelow with reference to the sequence listing part. Nucleotide sequence SEQ ID:44 is located at position 9636 relative to the genome of Vaccinia virus.

[0770] VGAM58 precursor RNA, herein designated VGAM PRECURSOR RNA, folds onto itself, forming VGAM58 folded precursor RNA, herein designated VGAM FOLDED PRECURSOR RNA, which has a two-dimensional hairpin structure. As is well known in the art, this hairpin structure, is typical of RNA encoded by miRNA genes, and is due to the fact that the nucleotide sequence of the first half of the RNA encoded by a miRNA gene is an accurate or partial inversed-reversed sequence of the nucleotide sequence of the second half thereof.

[0771] An enzyme complex designated DICER COMPLEX, dices the VGAM58 folded precursor RNA, herein designated VGAM FOLDED PRECURSOR RNA, into VGAM58 RNA, herein designated VGAM RNA, a single stranded ˜22 nt long RNA segment. As is known in the art, dicing of a hairpin structured RNA precursor product into a short ˜22 nt RNA segment is catalyzed by an enzyme complex comprising an enzyme called Dicer together with other necessary proteins. A probable (over 71%) nucleotide sequence of VGAM58 RNA is designated SEQ ID:393, and is provided hereinbelow with reference to the sequence listing part.

[0772] VGAM58 host target gene, herein designated VGAM HOST TARGET GENE, encodes a corresponding messenger RNA, VGAM58 host target RNA, herein designated VGAM HOST TARGET RNA. VGAM58 host target RNA, herein designated VGAM HOST TARGET RNA, comprises three regions, as is typical of mRNA of a protein coding gene: a 5 untranslated region, a protein coding region and a 3 untranslated region, designated 5UTR, PROTEIN CODING and 3UTR respectively.

[0773] VGAM58 RNA, herein designated VGAM RNA, binds complementarily to one or more host target binding sites located in untranslated regions of VGAM58 host target RNA, herein designated VGAM HOST TARGET RNA. This complementary binding is due to the fact that the nucleotide sequence of VGAM58 RNA, herein designated VGAM RNA, is an accurate or a partial inversed-reversed sequence of the nucleotide sequence of each of the host target binding sites. As an illustration, FIG. 1 shows 3 such host target binding sites, designated BINDING SITE I, BINDING SITE II and BINDING SITE III respectively. It is appreciated that the number of host target binding sites shown in FIG. 1 is meant as an illustration only, and is not meant to be limiting VGAM58 RNA, herein designated VGAM RNA, may have a different number of host target binding sites in untranslated regions of a VGAM58 host target RNA, herein designated VGAM HOST TARGET RNA. It is further appreciated that while FIG. 1 depicts host target binding sites in the 3UTR region, this is meant as an example only these host target binding sites may be located in the 3UTR region, the 5UTR region, or in both 3UTR and 5UTR regions.

[0774] The complementary binding of VGAM58 RNA, herein designated VGAM RNA, to host target binding sites on VGAM58 host target RNA, herein designated VGAM HOST TARGET RNA, such as BINDING SITE I, BINDING SITE II and BINDING SITE III, inhibits translation of VGAM58 host target RNA, herein designated VGAM HOST TARGET RNA, into VGAM58 host target protein, herein designated VGAM HOST TARGET PROTEIN. VGAM host target protein is therefore outlined by a broken line.

[0775] It is appreciated that VGAM58 host target gene, herein designated VGAM HOST TARGET GENE, in fact represents a plurality of VGAM58 host target genes. The mRNA of each one of this plurality of VGAM58 host target genes comprises one or more host target binding sites, each having a nucleotide sequence which is at least partly complementary to VGAM58 RNA, herein designated VGAM RNA, and which when bound by VGAM58 RNA, herein designated VGAM RNA, causes inhibition of translation of respective one or more VGAM58 host target proteins.

[0776] It is further appreciated by one skilled in the art that the mode of translational inhibition illustrated by FIG. 1 with specific reference to translational inhibition exerted by VGAM58 gene, herein designated VGAM GENE, on one or more VGAM58 host target gene, herein designated VGAM HOST TARGET GENE, is in fact common to other known non-viral miRNA genes. As mentioned hereinabove with reference to the background section, although a specific complementary binding site has been demonstrated only for some of the known miRNA genes (primarily Lin-4 and Let-7), all other recently discovered miRNA genes are also believed by those skilled in the art to modulate expression of other genes by complementary binding, although specific complementary binding sites of these other miRNA genes have not yet been found (Ruvkun G., Perspective: Glimpses of a tiny RNA world, Science 294, 779 (2001)).

[0777] It is yet further appreciated that a function of VGAM58 is inhibition of expression of host target genes, as part of a novel viral mechanism of attacking a host. Accordingly, utilities of VGAM58 include diagnosis, prevention and treatment of viral infection by Vaccinia virus. Specific functions, and accordingly utilities, of VGAM58 correlate with, and may be deduced from, the identity of the host target genes which VGAM58 binds and inhibits, and the function of these host target genes, as elaborated hereinbelow.

[0778] Nucleotide sequences of the VGAM58 precursor RNA, herein designated VGAM PRECURSOR RNA, and of the diced VGAM58 RNA, herein designated VGAM RNA, and a schematic representation of the secondary folding of VGAM58 folded precursor RNA, herein designated VGAM FOLDED PRECURSOR RNA, of VGAM58 are further described hereinbelow with reference to Table 1.

[0779] Nucleotide sequences of host target binding sites, such as BINDING SITE-I, BINDING SITE-II and BINDING SITE-III of FIG. 1, found on, and schematic representation of the complementarity of each of these host target binding sites to VGAM58 RNA, herein designated VGAM RNA, are described hereinbelow with reference to Table 2.

[0780] FIG. 1 further provides a conceptual description of another novel bioinformatically detected viral gene of the present invention, referred to here as Viral Genomic Address Messenger 59 (VGAM59) viral gene, which modulates expression of respective host target genes thereof, the function and utility of which host target genes is known in the art.

[0781] VGAM59 is a novel bioinformatically detected regulatory, non protein coding, viral micro RNA (miRNA) gene. The method by which VGAM59 was detected is described hereinabove with reference to FIGS. 2-8.

[0782] VGAM59 gene, herein designated VGAM GENE, is a viral gene contained in the genome of Vaccinia virus. VGAM59 host target gene, herein designated VGAM HOST TARGET GENE, is a human gene contained in the human genome.

[0783] VGAM59 gene, herein designated VGAM GENE, encodes a VGAM59 precursor RNA, herein designated VGAM PRECURSOR RNA. Similar to other miRNA genes, and unlike most ordinary genes, VGAM59 precursor RNA, herein designated VGAM PRECURSOR RNA, does not encode a protein. A nucleotide sequence identical or highly similar to the nucleotide sequence of VGAM59 precursor RNA is designated SEQ ID:45, and is provided hereinbelow with reference to the sequence listing part. Nucleotide sequence SEQ ID:45 is located at position 13536 relative to the genome of Vaccinia virus.

[0784] VGAM59 precursor RNA, herein designated VGAM PRECURSOR RNA, folds onto itself, forming VGAM59 folded precursor RNA, herein designated VGAM FOLDED PRECURSOR RNA, which has a two-dimensional hairpin structure. As is well known in the art, this hairpin structure, is typical of RNA encoded by miRNA genes, and is due to the fact that the nucleotide sequence of the first half of the RNA encoded by a miRNA gene is an accurate or partial inversed-reversed sequence of the nucleotide sequence of the second half thereof.

[0785] An enzyme complex designated DICER COMPLEX, dices the VGAM59 folded precursor RNA, herein designated VGAM FOLDED PRECURSOR RNA, into VGAM59 RNA, herein designated VGAM RNA, a single stranded ˜22 nt long RNA segment. As is known in the art, dicing of a hairpin structured RNA precursor product into a short ˜22 nt RNA segment is catalyzed by an enzyme complex comprising an enzyme called Dicer together with other necessary proteins. A probable (over 88%) nucleotide sequence of VGAM59 RNA is designated SEQ ID:394, and is provided hereinbelow with reference to the sequence listing part.

[0786] VGAM59 host target gene, herein designated VGAM HOST TARGET GENE, encodes a corresponding messenger RNA, VGAM59 host target RNA, herein designated VGAM HOST TARGET RNA. VGAM59 host target RNA, herein designated VGAM HOST TARGET RNA, comprises three regions, as is typical of mRNA of a protein coding gene: a 5 untranslated region, a protein coding region and a 3 untranslated region, designated 5UTR, PROTEIN CODING and 3UTR respectively.

[0787] VGAM59 RNA, herein designated VGAM RNA, binds complementarily to one or more host target binding sites located in untranslated regions of VGAM59 host target RNA, herein designated VGAM HOST TARGET RNA. This complementary binding is due to the fact that the nucleotide sequence of VGAM59 RNA, herein designated VGAM RNA, is an accurate or a partial inversed-reversed sequence of the nucleotide sequence of each of the host target binding sites. As an illustration, FIG. 1 shows 3 such host target binding sites, designated BINDING SITE I, BINDING SITE II and BINDING SITE III respectively. It is appreciated that the number of host target binding sites shown in FIG. 1 is meant as an illustration only, and is not meant to be limiting VGAM59 RNA, herein designated VGAM RNA, may have a different number of host target binding sites in untranslated regions of a VGAM59 host target RNA, herein designated VGAM HOST TARGET RNA. It is further appreciated that while FIG. 1 depicts host target binding sites in the 3UTR region, this is meant as an example only these host target binding sites may be located in the 3UTR region, the 5UTR region, or in both 3UTR and 5UTR regions.

[0788] The complementary binding of VGAM59 RNA, herein designated VGAM RNA, to host target binding sites on VGAM59 host target RNA, herein designated VGAM HOST TARGET RNA, such as BINDING SITE I, BINDING SITE II and BINDING SITE III, inhibits translation of VGAM59 host target RNA, herein designated VGAM HOST TARGET RNA, into VGAM59 host target protein, herein designated VGAM HOST TARGET PROTEIN. VGAM host target protein is therefore outlined by a broken line.

[0789] It is appreciated that VGAM59 host target gene, herein designated VGAM HOST TARGET GENE, in fact represents a plurality of VGAM59 host target genes. The mRNA of each one of this plurality of VGAM59 host target genes comprises one or more host target binding sites, each having a nucleotide sequence which is at least partly complementary to VGAM59 RNA, herein designated VGAM RNA, and which when bound by VGAM59 RNA, herein designated VGAM RNA, causes inhibition of translation of respective one or more VGAM59 host target proteins.

[0790] It is further appreciated by one skilled in the art that the mode of translational inhibition illustrated by FIG. 1 with specific reference to translational inhibition exerted by VGAM59 gene, herein designated VGAM GENE, on one or more VGAM59 host target gene, herein designated VGAM HOST TARGET GENE, is in fact common to other known non-viral miRNA genes. As mentioned hereinabove with reference to the background section, although a specific complementary binding site has been demonstrated only for some of the known miRNA genes (primarily Lin-4 and Let-7), all other recently discovered miRNA genes are also believed by those skilled in the art to modulate expression of other genes by complementary binding, although specific complementary binding sites of these other miRNA genes have not yet been found (Ruvkun G., Perspective: Glimpses of a tiny RNA world, Science 294, 779 (2001)).

[0791] It is yet further appreciated that a function of VGAM59 is inhibition of expression of host target genes, as part of a novel viral mechanism of attacking a host. Accordingly, utilities of VGAM59 include diagnosis, prevention and treatment of viral infection by Vaccinia virus. Specific functions, and accordingly utilities, of VGAM59 correlate with, and may be deduced from, the identity of the host target genes which VGAM59 binds and inhibits, and the function of these host target genes, as elaborated hereinbelow.

[0792] Nucleotide sequences of the VGAM59 precursor RNA, herein designated VGAM PRECURSOR RNA, and of the diced VGAM59 RNA, herein designated VGAM RNA, and a schematic representation of the secondary folding of VGAM59 folded precursor RNA, herein designated VGAM FOLDED PRECURSOR RNA, of VGAM59 are further described hereinbelow with reference to Table 1.

[0793] Nucleotide sequences of host target binding sites, such as BINDING SITE-I, BINDING SITE-II and BINDING SITE-III of FIG. 1, found on, and schematic representation of the complementarity of each of these host target binding sites to VGAM59 RNA, herein designated VGAM RNA, are described hereinbelow with reference to Table 2.

[0794] FIG. 1 further provides a conceptual description of another novel bioinformatically detected viral gene of the present invention, referred to here as Viral Genomic Address Messenger 60 (VGAM60) viral gene, which modulates expression of respective host target genes thereof, the function and utility of which host target genes is known in the art.

[0795] VGAM60 is a novel bioinformatically detected regulatory, non protein coding, viral micro RNA (miRNA) gene. The method by which VGAM60 was detected is described hereinabove with reference to FIGS. 2-8.

[0796] VGAM60 gene, herein designated VGAM GENE, is a viral gene contained in the genome of Vaccinia virus. VGAM60 host target gene, herein designated VGAM HOST TARGET GENE, is a human gene contained in the human genome.

[0797] VGAM60 gene, herein designated VGAM GENE, encodes a VGAM60 precursor RNA, herein designated VGAM PRECURSOR RNA. Similar to other miRNA genes, and unlike most ordinary genes, VGAM60 precursor RNA, herein designated VGAM PRECURSOR RNA, does not encode a protein. A nucleotide sequence identical or highly similar to the nucleotide sequence of VGAM60 precursor RNA is designated SEQ ID:46, and is provided hereinbelow with reference to the sequence listing part. Nucleotide sequence SEQ ID:46 is located at position 9389 relative to the genome of Vaccinia virus.

[0798] VGAM60 precursor RNA, herein designated VGAM PRECURSOR RNA, folds onto itself, forming VGAM60 folded precursor RNA, herein designated VGAM FOLDED PRECURSOR RNA, which has a two-dimensional hairpin structure. As is well known in the art, this hairpin structure, is typical of RNA encoded by miRNA genes, and is due to the fact that the nucleotide sequence of the first half of the RNA encoded by a miRNA gene is an accurate or partial inversed-reversed sequence of the nucleotide sequence of the second half thereof.

[0799] An enzyme complex designated DICER COMPLEX, dices the VGAM60 folded precursor RNA, herein designated VGAM FOLDED PRECURSOR RNA, into VGAM60 RNA, herein designated VGAM RNA, a single stranded ˜22 nt long RNA segment. As is known in the art, dicing of a hairpin structured RNA precursor product into a short ˜22 nt RNA segment is catalyzed by an enzyme complex comprising an enzyme called Dicer together with other necessary proteins. A probable (over 70%) nucleotide sequence of VGAM60 RNA is designated SEQ ID:395, and is provided hereinbelow with reference to the sequence listing part.

[0800] VGAM60 host target gene, herein designated VGAM HOST TARGET GENE, encodes a corresponding messenger RNA, VGAM60 host target RNA, herein designated VGAM HOST TARGET RNA. VGAM60 host target RNA, herein designated VGAM HOST TARGET RNA, comprises three regions, as is typical of mRNA of a protein coding gene: a 5 untranslated region, a protein coding region and a 3 untranslated region, designated 5UTR, PROTEIN CODING and 3UTR respectively.

[0801] VGAM60 RNA, herein designated VGAM RNA, binds complementarily to one or more host target binding sites located in untranslated regions of VGAM60 host target RNA, herein designated VGAM HOST TARGET RNA. This complementary binding is due to the fact that the nucleotide sequence of VGAM60 RNA, herein designated VGAM RNA, is an accurate or a partial inversed-reversed sequence of the nucleotide sequence of each of the host target binding sites. As an illustration, FIG. 1 shows 3 such host target binding sites, designated BINDING SITE I, BINDING SITE II and BINDING SITE III respectively. It is appreciated that the number of host target binding sites shown in FIG. 1 is meant as an illustration only, and is not meant to be limiting VGAM60 RNA, herein designated VGAM RNA, may have a different number of host target binding sites in untranslated regions of a VGAM60 host target RNA, herein designated VGAM HOST TARGET RNA. It is further appreciated that while FIG. 1 depicts host target binding sites in the 3UTR region, this is meant as an example only these host target binding sites may be located in the 3UTR region, the 5UTR region, or in both 3UTR and 5UTR regions.

[0802] The complementary binding of VGAM60 RNA, herein designated VGAM RNA, to host target binding sites on VGAM60 host target RNA, herein designated VGAM HOST TARGET RNA, such as BINDING SITE I, BINDING SITE II and BINDING SITE III, inhibits translation of VGAM60 host target RNA, herein designated VGAM HOST TARGET RNA, into VGAM60 host target protein, herein designated VGAM HOST TARGET PROTEIN. VGAM host target protein is therefore outlined by a broken line.

[0803] It is appreciated that VGAM60 host target gene, herein designated VGAM HOST TARGET GENE, in fact represents a plurality of VGAM60 host target genes. The mRNA of each one of this plurality of VGAM60 host target genes comprises one or more host target binding sites, each having a nucleotide sequence which is at least partly complementary to VGAM60 RNA, herein designated VGAM RNA, and which when bound by VGAM60 RNA, herein designated VGAM RNA, causes inhibition of translation of respective one or more VGAM60 host target proteins.

[0804] It is further appreciated by one skilled in the art that the mode of translational inhibition illustrated by FIG. 1 with specific reference to translational inhibition exerted by VGAM60 gene, herein designated VGAM GENE, on one or more VGAM60 host target gene, herein designated VGAM HOST TARGET GENE, is in fact common to other known non-viral miRNA genes. As mentioned hereinabove with reference to the background section, although a specific complementary binding site has been demonstrated only for some of the known miRNA genes (primarily Lin-4 and Let-7), all other recently discovered miRNA genes are also believed by those skilled in the art to modulate expression of other genes by complementary binding, although specific complementary binding sites of these other miRNA genes have not yet been found (Ruvkun G., Perspective: Glimpses of a tiny RNA world, Science 294, 779 (2001)).

[0805] It is yet further appreciated that a function of VGAM60 is inhibition of expression of host target genes, as part of a novel viral mechanism of attacking a host. Accordingly, utilities of VGAM60 include diagnosis, prevention and treatment of viral infection by Vaccinia virus. Specific functions, and accordingly utilities, of VGAM60 correlate with, and may be deduced from, the identity of the host target genes which VGAM60 binds and inhibits, and the function of these host target genes, as elaborated hereinbelow.

[0806] Nucleotide sequences of the VGAM60 precursor RNA, herein designated VGAM PRECURSOR RNA, and of the diced VGAM60 RNA, herein designated VGAM RNA, and a schematic representation of the secondary folding of VGAM60 folded precursor RNA, herein designated VGAM FOLDED PRECURSOR RNA, of VGAM60 are further described hereinbelow with reference to Table 1.

[0807] Nucleotide sequences of host target binding sites, such as BINDING SITE-I, BINDING SITE-II and BINDING SITE-III of FIG. 1, found on, and schematic representation of the complementarity of each of these host target binding sites to VGAM60 RNA, herein designated VGAM RNA, are described hereinbelow with reference to Table 2.

[0808] FIG. 1 further provides a conceptual description of another novel bioinformatically detected viral gene of the present invention, referred to here as Viral Genomic Address Messenger 61 (VGAM61) viral gene, which modulates expression of respective host target genes thereof, the function and utility of which host target genes is known in the art.

[0809] VGAM61 is a novel bioinformatically detected regulatory, non protein coding, viral micro RNA (miRNA) gene. The method by which VGAM61 was detected is described hereinabove with reference to FIGS. 2-8.

[0810] VGAM61 gene, herein designated VGAM GENE, is a viral gene contained in the genome of Vaccinia virus. VGAM61 host target gene, herein designated VGAM HOST TARGET GENE, is a human gene contained in the human genome.

[0811] VGAM61 gene, herein designated VGAM GENE, encodes a VGAM61 precursor RNA, herein designated VGAM PRECURSOR RNA. Similar to other miRNA genes, and unlike most ordinary genes, VGAM61 precursor RNA, herein designated VGAM PRECURSOR RNA, does not encode a protein. A nucleotide sequence identical or highly similar to the nucleotide sequence of VGAM61 precursor RNA is designated SEQ ID:47, and is provided hereinbelow with reference to the sequence listing part. Nucleotide sequence SEQ ID:47 is located at position 8516 relative to the genome of Vaccinia virus.

[0812] VGAM61 precursor RNA, herein designated VGAM PRECURSOR RNA, folds onto itself, forming VGAM61 folded precursor RNA, herein designated VGAM FOLDED PRECURSOR RNA, which has a two-dimensional hairpin structure. As is well known in the art, this hairpin structure, is typical of RNA encoded by miRNA genes, and is due to the fact that the nucleotide sequence of the first half of the RNA encoded by a miRNA gene is an accurate or partial inversed-reversed sequence of the nucleotide sequence of the second half thereof.

[0813] An enzyme complex designated DICER COMPLEX, dices the VGAM61 folded precursor RNA, herein designated VGAM FOLDED PRECURSOR RNA, into VGAM61 RNA, herein designated VGAM RNA, a single stranded ˜22 nt long RNA segment. As is known in the art, dicing of a hairpin structured RNA precursor product into a short ˜22 nt RNA segment is catalyzed by an enzyme complex comprising an enzyme called Dicer together with other necessary proteins. A probable (over 73%) nucleotide sequence of VGAM61 RNA is designated SEQ ID:396, and is provided hereinbelow with reference to the sequence listing part.

[0814] VGAM61 host target gene, herein designated VGAM HOST TARGET GENE, encodes a corresponding messenger RNA, VGAM61 host target RNA, herein designated VGAM HOST TARGET RNA. VGAM61 host target RNA, herein designated VGAM HOST TARGET RNA, comprises three regions, as is typical of mRNA of a protein coding gene: a 5 untranslated region, a protein coding region and a 3 untranslated region, designated 5UTR, PROTEIN CODING and 3UTR respectively.

[0815] VGAM61 RNA, herein designated VGAM RNA, binds complementarily to one or more host target binding sites located in untranslated regions of VGAM61 host target RNA, herein designated VGAM HOST TARGET RNA. This complementary binding is due to the fact that the nucleotide sequence of VGAM61 RNA, herein designated VGAM RNA, is an accurate or a partial inversed-reversed sequence of the nucleotide sequence of each of the host target binding sites. As an illustration, FIG. 1 shows 3 such host target binding sites, designated BINDING SITE I, BINDING SITE II and BINDING SITE III respectively. It is appreciated that the number of host target binding sites shown in FIG. 1 is meant as an illustration only, and is not meant to be limiting VGAM61 RNA, herein designated VGAM RNA, may have a different number of host target binding sites in untranslated regions of a VGAM61 host target RNA, herein designated VGAM HOST TARGET RNA. It is further appreciated that while FIG. 1 depicts host target binding sites in the 3UTR region, this is meant as an example only these host target binding sites may be located in the 3UTR region, the 5UTR region, or in both 3UTR and 5UTR regions.

[0816] The complementary binding of VGAM61 RNA, herein designated VGAM RNA, to host target binding sites on VGAM61 host target RNA, herein designated VGAM HOST TARGET RNA, such as BINDING SITE I, BINDING SITE II and BINDING SITE III, inhibits translation of VGAM61 host target RNA, herein designated VGAM HOST TARGET RNA, into VGAM61 host target protein, herein designated VGAM HOST TARGET PROTEIN. VGAM host target protein is therefore outlined by a broken line.

[0817] It is appreciated that VGAM61 host target gene, herein designated VGAM HOST TARGET GENE, in fact represents a plurality of VGAM61 host target genes. The mRNA of each one of this plurality of VGAM61 host target genes comprises one or more host target binding sites, each having a nucleotide sequence which is at least partly complementary to VGAM61 RNA, herein designated VGAM RNA, and which when bound by VGAM61 RNA, herein designated VGAM RNA, causes inhibition of translation of respective one or more VGAM61 host target proteins.

[0818] It is further appreciated by one skilled in the art that the mode of translational inhibition illustrated by FIG. 1 with specific reference to translational inhibition exerted by VGAM61 gene, herein designated VGAM GENE, on one or more VGAM61 host target gene, herein designated VGAM HOST TARGET GENE, is in fact common to other known non-viral miRNA genes. As mentioned hereinabove with reference to the background section, although a specific complementary binding site has been demonstrated only for some of the known miRNA genes (primarily Lin-4 and Let-7), all other recently discovered miRNA genes are also believed by those skilled in the art to modulate expression of other genes by complementary binding, although specific complementary binding sites of these other miRNA genes have not yet been found (Ruvkun G., Perspective: Glimpses of a tiny RNA world, Science 294, 779 (2001)).

[0819] It is yet further appreciated that a function of VGAM61 is inhibition of expression of host target genes, as part of a novel viral mechanism of attacking a host. Accordingly, utilities of VGAM61 include diagnosis, prevention and treatment of viral infection by Vaccinia virus. Specific functions, and accordingly utilities, of VGAM61 correlate with, and may be deduced from, the identity of the host target genes which VGAM61 binds and inhibits, and the function of these host target genes, as elaborated hereinbelow.

[0820] Nucleotide sequences of the VGAM61 precursor RNA, herein designated VGAM PRECURSOR RNA, and of the diced VGAM61 RNA, herein designated VGAM RNA, and a schematic representation of the secondary folding of VGAM61 folded precursor RNA, herein designated VGAM FOLDED PRECURSOR RNA, of VGAM61 are further described hereinbelow with reference to Table 1.

[0821] Nucleotide sequences of host target binding sites, such as BINDING SITE-I, BINDING SITE-II and BINDING SITE-III of FIG. 1, found on, and schematic representation of the complementarity of each of these host target binding sites to VGAM61 RNA, herein designated VGAM RNA, are described hereinbelow with reference to Table 2.

[0822] FIG. 1 further provides a conceptual description of another novel bioinformatically detected viral gene of the present invention, referred to here as Viral Genomic Address Messenger 62 (VGAM62) viral gene, which modulates expression of respective host target genes thereof, the function and utility of which host target genes is known in the art.

[0823] VGAM62 is a novel bioinformatically detected regulatory, non protein coding, viral micro RNA (miRNA) gene. The method by which VGAM62 was detected is described hereinabove with reference to FIGS. 2-8.

[0824] VGAM62 gene, herein designated VGAM GENE, is a viral gene contained in the genome of Vaccinia virus. VGAM62 host target gene, herein designated VGAM HOST TARGET GENE, is a human gene contained in the human genome.

[0825] VGAM62 gene, herein designated VGAM GENE, encodes a VGAM62 precursor RNA, herein designated VGAM PRECURSOR RNA. Similar to other miRNA genes, and unlike most ordinary genes, VGAM62 precursor RNA, herein designated VGAM PRECURSOR RNA, does not encode a protein. A nucleotide sequence identical or highly similar to the nucleotide sequence of VGAM62 precursor RNA is designated SEQ ID:48, and is provided hereinbelow with reference to the sequence listing part. Nucleotide sequence SEQ ID:48 is located at position 10036 relative to the genome of Vaccinia virus.

[0826] VGAM62 precursor RNA, herein designated VGAM PRECURSOR RNA, folds onto itself, forming VGAM62 folded precursor RNA, herein designated VGAM FOLDED PRECURSOR RNA, which has a two-dimensional hairpin structure. As is well known in the art, this hairpin structure, is typical of RNA encoded by miRNA genes, and is due to the fact that the nucleotide sequence of the first half of the RNA encoded by a miRNA gene is an accurate or partial inversed-reversed sequence of the nucleotide sequence of the second half thereof.

[0827] An enzyme complex designated DICER COMPLEX, dices the VGAM62 folded precursor RNA, herein designated VGAM FOLDED PRECURSOR RNA, into VGAM62 RNA, herein designated VGAM RNA, a single stranded ˜22 nt long RNA segment. As is known in the art, dicing of a hairpin structured RNA precursor product into a short ˜22 nt RNA segment is catalyzed by an enzyme complex comprising an enzyme called Dicer together with other necessary proteins. A probable (over 83%) nucleotide sequence of VGAM62 RNA is designated SEQ ID:397, and is provided hereinbelow with reference to the sequence listing part.

[0828] VGAM62 host target gene, herein designated VGAM HOST TARGET GENE, encodes a corresponding messenger RNA, VGAM62 host target RNA, herein designated VGAM HOST TARGET RNA. VGAM62 host target RNA, herein designated VGAM HOST TARGET RNA, comprises three regions, as is typical of mRNA of a protein coding gene: a 5 untranslated region, a protein coding region and a 3 untranslated region, designated 5UTR, PROTEIN CODING and 3UTR respectively.

[0829] VGAM62 RNA, herein designated VGAM RNA, binds complementarily to one or more host target binding sites located in untranslated regions of VGAM62 host target RNA, herein designated VGAM HOST TARGET RNA. This complementary binding is due to the fact that the nucleotide sequence of VGAM62 RNA, herein designated VGAM RNA, is an accurate or a partial inversed-reversed sequence of the nucleotide sequence of each of the host target binding sites. As an illustration, FIG. 1 shows 3 such host target binding sites, designated BINDING SITE I, BINDING SITE II and BINDING SITE III respectively. It is appreciated that the number of host target binding sites shown in FIG. 1 is meant as an illustration only, and is not meant to be limiting VGAM62 RNA, herein designated VGAM RNA, may have a different number of host target binding sites in untranslated regions of a VGAM62 host target RNA, herein designated VGAM HOST TARGET RNA. It is further appreciated that while FIG. 1 depicts host target binding sites in the 3UTR region, this is meant as an example only these host target binding sites may be located in the 3UTR region, the 5UTR region, or in both 3UTR and 5UTR regions.

[0830] The complementary binding of VGAM62 RNA, herein designated VGAM RNA, to host target binding sites on VGAM62 host target RNA, herein designated VGAM HOST TARGET RNA, such as BINDING SITE I, BINDING SITE II and BINDING SITE III, inhibits translation of VGAM62 host target RNA, herein designated VGAM HOST TARGET RNA, into VGAM62 host target protein, herein designated VGAM HOST TARGET PROTEIN. VGAM host target protein is therefore outlined by a broken line.

[0831] It is appreciated that VGAM62 host target gene, herein designated VGAM HOST TARGET GENE, in fact represents a plurality of VGAM62 host target genes. The mRNA of each one of this plurality of VGAM62 host target genes comprises one or more host target binding sites, each having a nucleotide sequence which is at least partly complementary to VGAM62 RNA, herein designated VGAM RNA, and which when bound by VGAM62 RNA, herein designated VGAM RNA, causes inhibition of translation of respective one or more VGAM62 host target proteins.

[0832] It is further appreciated by one skilled in the art that the mode of translational inhibition illustrated by FIG. 1 with specific reference to translational inhibition exerted by VGAM62 gene, herein designated VGAM GENE, on one or more VGAM62 host target gene, herein designated VGAM HOST TARGET GENE, is in fact common to other known non-viral miRNA genes. As mentioned hereinabove with reference to the background section, although a specific complementary binding site has been demonstrated only for some of the known miRNA genes (primarily Lin-4 and Let-7), all other recently discovered miRNA genes are also believed by those skilled in the art to modulate expression of other genes by complementary binding, although specific complementary binding sites of these other miRNA genes have not yet been found (Ruvkun G., Perspective: Glimpses of a tiny RNA world, Science 294, 779 (2001)).

[0833] It is yet further appreciated that a function of VGAM62 is inhibition of expression of host target genes, as part of a novel viral mechanism of attacking a host. Accordingly, utilities of VGAM62 include diagnosis, prevention and treatment of viral infection by Vaccinia virus. Specific functions, and accordingly utilities, of VGAM62 correlate with, and may be deduced from, the identity of the host target genes which VGAM62 binds and inhibits, and the function of these host target genes, as elaborated hereinbelow.

[0834] Nucleotide sequences of the VGAM62 precursor RNA, herein designated VGAM PRECURSOR RNA, and of the diced VGAM62 RNA, herein designated VGAM RNA, and a schematic representation of the secondary folding of VGAM62 folded precursor RNA, herein designated VGAM FOLDED PRECURSOR RNA, of VGAM62 are further described hereinbelow with reference to Table 1.

[0835] Nucleotide sequences of host target binding sites, such as BINDING SITE-I, BINDING SITE-II and BINDING SITE-III of FIG. 1, found on, and schematic representation of the complementarity of each of these host target binding sites to VGAM62 RNA, herein designated VGAM RNA, are described hereinbelow with reference to Table 2.

[0836] FIG. 1 further provides a conceptual description of another novel bioinformatically detected viral gene of the present invention, referred to here as Viral Genomic Address Messenger 63 (VGAM63) viral gene, which modulates expression of respective host target genes thereof, the function and utility of which host target genes is known in the art.

[0837] VGAM63 is a novel bioinformatically detected regulatory, non protein coding, viral micro RNA (miRNA) gene. The method by which VGAM63 was detected is described hereinabove with reference to FIGS. 2-8.

[0838] VGAM63 gene, herein designated VGAM GENE, is a viral gene contained in the genome of Vaccinia virus. VGAM63 host target gene, herein designated VGAM HOST TARGET GENE, is a human gene contained in the human genome.

[0839] VGAM63 gene, herein designated VGAM GENE, encodes a VGAM63 precursor RNA, herein designated VGAM PRECURSOR RNA. Similar to other miRNA genes, and unlike most ordinary genes, VGAM63 precursor RNA, herein designated VGAM PRECURSOR RNA, does not encode a protein. A nucleotide sequence identical or highly similar to the nucleotide sequence of VGAM63 precursor RNA is designated SEQ ID:49, and is provided hereinbelow with reference to the sequence listing part. Nucleotide sequence SEQ ID:49 is located at position 14074 relative to the genome of Vaccinia virus.

[0840] VGAM63 precursor RNA, herein designated VGAM PRECURSOR RNA, folds onto itself, forming VGAM63 folded precursor RNA, herein designated VGAM FOLDED PRECURSOR RNA, which has a two-dimensional hairpin structure. As is well known in the art, this hairpin structure, is typical of RNA encoded by miRNA genes, and is due to the fact that the nucleotide sequence of the first half of the RNA encoded by a miRNA gene is an accurate or partial inversed-reversed sequence of the nucleotide sequence of the second half thereof.

[0841] An enzyme complex designated DICER COMPLEX, dices the VGAM63 folded precursor RNA, herein designated VGAM FOLDED PRECURSOR RNA, into VGAM63 RNA, herein designated VGAM RNA, a single stranded ˜22 nt long RNA segment. As is known in the art, dicing of a hairpin structured RNA precursor product into a short ˜22 nt RNA segment is catalyzed by an enzyme complex comprising an enzyme called Dicer together with other necessary proteins. A probable (over 71%) nucleotide sequence of VGAM63 RNA is designated SEQ ID:398, and is provided hereinbelow with reference to the sequence listing part.

[0842] VGAM63 host target gene, herein designated VGAM HOST TARGET GENE, encodes a corresponding messenger RNA, VGAM63 host target RNA, herein designated VGAM HOST TARGET RNA. VGAM63 host target RNA, herein designated VGAM HOST TARGET RNA, comprises three regions, as is typical of mRNA of a protein coding gene: a 5 untranslated region, a protein coding region and a 3 untranslated region, designated 5UTR, PROTEIN CODING and 3UTR respectively.

[0843] VGAM63 RNA, herein designated VGAM RNA, binds complementarily to one or more host target binding sites located in untranslated regions of VGAM63 host target RNA, herein designated VGAM HOST TARGET RNA. This complementary binding is due to the fact that the nucleotide sequence of VGAM63 RNA, herein designated VGAM RNA, is an accurate or a partial inversed-reversed sequence of the nucleotide sequence of each of the host target binding sites. As an illustration, FIG. 1 shows 3 such host target binding sites, designated BINDING SITE I, BINDING SITE II and BINDING SITE III respectively. It is appreciated that the number of host target binding sites shown in FIG. 1 is meant as an illustration only, and is not meant to be limiting VGAM63 RNA, herein designated VGAM RNA, may have a different number of host target binding sites in untranslated regions of a VGAM63 host target RNA, herein designated VGAM HOST TARGET RNA. It is further appreciated that while FIG. 1 depicts host target binding sites in the 3UTR region, this is meant as an example only these host target binding sites may be located in the 3UTR region, the 5UTR region, or in both 3UTR and 5UTR regions.

[0844] The complementary binding of VGAM63 RNA, herein designated VGAM RNA, to host target binding sites on VGAM63 host target RNA, herein designated VGAM HOST TARGET RNA, such as BINDING SITE I, BINDING SITE II and BINDING SITE III, inhibits translation of VGAM63 host target RNA, herein designated VGAM HOST TARGET RNA, into VGAM63 host target protein, herein designated VGAM HOST TARGET PROTEIN. VGAM host target protein is therefore outlined by a broken line.

[0845] It is appreciated that VGAM63 host target gene, herein designated VGAM HOST TARGET GENE, in fact represents a plurality of VGAM63 host target genes. The mRNA of each one of this plurality of VGAM63 host target genes comprises one or more host target binding sites, each having a nucleotide sequence which is at least partly complementary to VGAM63 RNA, herein designated VGAM RNA, and which when bound by VGAM63 RNA, herein designated VGAM RNA, causes inhibition of translation of respective one or more VGAM63 host target proteins.

[0846] It is further appreciated by one skilled in the art that the mode of translational inhibition illustrated by FIG. 1 with specific reference to translational inhibition exerted by VGAM63 gene, herein designated VGAM GENE, on one or more VGAM63 host target gene, herein designated VGAM HOST TARGET GENE, is in fact common to other known non-viral miRNA genes. As mentioned hereinabove with reference to the background section, although a specific complementary binding site has been demonstrated only for some of the known miRNA genes (primarily Lin-4 and Let-7), all other recently discovered miRNA genes are also believed by those skilled in the art to modulate expression of other genes by complementary binding, although specific complementary binding sites of these other miRNA genes have not yet been found (Ruvkun G., Perspective: Glimpses of a tiny RNA world, Science 294, 779 (2001)).

[0847] It is yet further appreciated that a function of VGAM63 is inhibition of expression of host target genes, as part of a novel viral mechanism of attacking a host. Accordingly, utilities of VGAM63 include diagnosis, prevention and treatment of viral infection by Vaccinia virus. Specific functions, and accordingly utilities, of VGAM63 correlate with, and may be deduced from, the identity of the host target genes which VGAM63 binds and inhibits, and the function of these host target genes, as elaborated hereinbelow.

[0848] Nucleotide sequences of the VGAM63 precursor RNA, herein designated VGAM PRECURSOR RNA, and of the diced VGAM63 RNA, herein designated VGAM RNA, and a schematic representation of the secondary folding of VGAM63 folded precursor RNA, herein designated VGAM FOLDED PRECURSOR RNA, of VGAM63 are further described hereinbelow with reference to Table 1.

[0849] Nucleotide sequences of host target binding sites, such as BINDING SITE-I, BINDING SITE-II and BINDING SITE-III of FIG. 1, found on, and schematic representation of the complementarity of each of these host target binding sites to VGAM63 RNA, herein designated VGAM RNA, are described hereinbelow with reference to Table 2.

[0850] FIG. 1 further provides a conceptual description of another novel bioinformatically detected viral gene of the present invention, referred to here as Viral Genomic Address Messenger 64 (VGAM64) viral gene, which modulates expression of respective host target genes thereof, the function and utility of which host target genes is known in the art.

[0851] VGAM64 is a novel bioinformatically detected regulatory, non protein coding, viral micro RNA (miRNA) gene. The method by which VGAM64 was detected is described hereinabove with reference to FIGS. 2-8.

[0852] VGAM64 gene, herein designated VGAM GENE, is a viral gene contained in the genome of Vaccinia virus. VGAM64 host target gene, herein designated VGAM HOST TARGET GENE, is a human gene contained in the human genome.

[0853] VGAM64 gene, herein designated VGAM GENE, encodes a VGAM64 precursor RNA, herein designated VGAM PRECURSOR RNA. Similar to other miRNA genes, and unlike most ordinary genes, VGAM64 precursor RNA, herein designated VGAM PRECURSOR RNA, does not encode a protein. A nucleotide sequence identical or highly similar to the nucleotide sequence of VGAM64 precursor RNA is designated SEQ ID:50, and is provided hereinbelow with reference to the sequence listing part. Nucleotide sequence SEQ ID:50 is located at position 9005 relative to the genome of Vaccinia virus.

[0854] VGAM64 precursor RNA, herein designated VGAM PRECURSOR RNA, folds onto itself, forming VGAM64 folded precursor RNA, herein designated VGAM FOLDED PRECURSOR RNA, which has a two-dimensional hairpin structure. As is well known in the art, this hairpin structure, is typical of RNA encoded by miRNA genes, and is due to the fact that the nucleotide sequence of the first half of the RNA encoded by a miRNA gene is an accurate or partial inversed-reversed sequence of the nucleotide sequence of the second half thereof.

[0855] An enzyme complex designated DICER COMPLEX, dices the VGAM64 folded precursor RNA, herein designated VGAM FOLDED PRECURSOR RNA, into VGAM64 RNA, herein designated VGAM RNA, a single stranded ˜22 nt long RNA segment. As is known in the art, dicing of a hairpin structured RNA precursor product into a short ˜22 nt RNA segment is catalyzed by an enzyme complex comprising an enzyme called Dicer together with other necessary proteins. A probable (over 70%) nucleotide sequence of VGAM64 RNA is designated SEQ ID:399, and is provided hereinbelow with reference to the sequence listing part.

[0856] VGAM64 host target gene, herein designated VGAM HOST TARGET GENE, encodes a corresponding messenger RNA, VGAM64 host target RNA, herein designated VGAM HOST TARGET RNA. VGAM64 host target RNA, herein designated VGAM HOST TARGET RNA, comprises three regions, as is typical of mRNA of a protein coding gene: a 5 untranslated region, a protein coding region and a 3 untranslated region, designated 5UTR, PROTEIN CODING and 3UTR respectively.

[0857] VGAM64 RNA, herein designated VGAM RNA, binds complementarily to one or more host target binding sites located in untranslated regions of VGAM64 host target RNA, herein designated VGAM HOST TARGET RNA. This complementary binding is due to the fact that the nucleotide sequence of VGAM64 RNA, herein designated VGAM RNA, is an accurate or a partial inversed-reversed sequence of the nucleotide sequence of each of the host target binding sites. As an illustration, FIG. 1 shows 3 such host target binding sites, designated BINDING SITE I, BINDING SITE II and BINDING SITE III respectively. It is appreciated that the number of host target binding sites shown in FIG. 1 is meant as an illustration only, and is not meant to be limiting VGAM64 RNA, herein designated VGAM RNA, may have a different number of host target binding sites in untranslated regions of a VGAM64 host target RNA, herein designated VGAM HOST TARGET RNA. It is further appreciated that while FIG. 1 depicts host target binding sites in the 3UTR region, this is meant as an example only these host target binding sites may be located in the 3UTR region, the 5UTR region, or in both 3UTR and 5UTR regions.

[0858] The complementary binding of VGAM64 RNA, herein designated VGAM RNA, to host target binding sites on VGAM64 host target RNA, herein designated VGAM HOST TARGET RNA, such as BINDING SITE I, BINDING SITE II and BINDING SITE III, inhibits translation of VGAM64 host target RNA, herein designated VGAM HOST TARGET RNA, into VGAM64 host target protein, herein designated VGAM HOST TARGET PROTEIN. VGAM host target protein is therefore outlined by a broken line.

[0859] It is appreciated that VGAM64 host target gene, herein designated VGAM HOST TARGET GENE, in fact represents a plurality of VGAM64 host target genes. The mRNA of each one of this plurality of VGAM64 host target genes comprises one or more host target binding sites, each having a nucleotide sequence which is at least partly complementary to VGAM64 RNA, herein designated VGAM RNA, and which when bound by VGAM64 RNA, herein designated VGAM RNA, causes inhibition of translation of respective one or more VGAM64 host target proteins.

[0860] It is further appreciated by one skilled in the art that the mode of translational inhibition illustrated by FIG. 1 with specific reference to translational inhibition exerted by VGAM64 gene, herein designated VGAM GENE, on one or more VGAM64 host target gene, herein designated VGAM HOST TARGET GENE, is in fact common to other known non-viral miRNA genes. As mentioned hereinabove with reference to the background section, although a specific complementary binding site has been demonstrated only for some of the known miRNA genes (primarily Lin-4 and Let-7), all other recently discovered miRNA genes are also believed by those skilled in the art to modulate expression of other genes by complementary binding, although specific complementary binding sites of these other miRNA genes have not yet been found (Ruvkun G., Perspective: Glimpses of a tiny RNA world, Science 294, 779 (2001)).

[0861] It is yet further appreciated that a function of VGAM64 is inhibition of expression of host target genes, as part of a novel viral mechanism of attacking a host. Accordingly, utilities of VGAM64 include diagnosis, prevention and treatment of viral infection by Vaccinia virus. Specific functions, and accordingly utilities, of VGAM64 correlate with, and may be deduced from, the identity of the host target genes which VGAM64 binds and inhibits, and the function of these host target genes, as elaborated hereinbelow.

[0862] Nucleotide sequences of the VGAM64 precursor RNA, herein designated VGAM PRECURSOR RNA, and of the diced VGAM64 RNA, herein designated VGAM RNA, and a schematic representation of the secondary folding of VGAM64 folded precursor RNA, herein designated VGAM FOLDED PRECURSOR RNA, of VGAM64 are further described hereinbelow with reference to Table 1.

[0863] Nucleotide sequences of host target binding sites, such as BINDING SITE-I, BINDING SITE-II and BINDING SITE-III of FIG. 1, found on, and schematic representation of the complementarity of each of these host target binding sites to VGAM64 RNA, herein designated VGAM RNA, are described hereinbelow with reference to Table 2.

[0864] FIG. 1 further provides a conceptual description of another novel bioinformatically detected viral gene of the present invention, referred to here as Viral Genomic Address Messenger 65 (VGAM65) viral gene, which modulates expression of respective host target genes thereof, the function and utility of which host target genes is known in the art.

[0865] VGAM65 is a novel bioinformatically detected regulatory, non protein coding, viral micro RNA (miRNA) gene. The method by which VGAM65 was detected is described hereinabove with reference to FIGS. 2-8.

[0866] VGAM65 gene, herein designated VGAM GENE, is a viral gene contained in the genome of Vaccinia virus. VGAM65 host target gene, herein designated VGAM HOST TARGET GENE, is a human gene contained in the human genome.

[0867] VGAM65 gene, herein designated VGAM GENE, encodes a VGAM65 precursor RNA, herein designated VGAM PRECURSOR RNA. Similar to other miRNA genes, and unlike most ordinary genes, VGAM65 precursor RNA, herein designated VGAM PRECURSOR RNA, does not encode a protein. A nucleotide sequence identical or highly similar to the nucleotide sequence of VGAM65 precursor RNA is designated SEQ ID:51, and is provided hereinbelow with reference to the sequence listing part. Nucleotide sequence SEQ ID:51 is located at position 10347 relative to the genome of Vaccinia virus.

[0868] VGAM65 precursor RNA, herein designated VGAM PRECURSOR RNA, folds onto itself, forming VGAM65 folded precursor RNA, herein designated VGAM FOLDED PRECURSOR RNA, which has a two-dimensional hairpin structure. As is well known in the art, this hairpin structure, is typical of RNA encoded by miRNA genes, and is due to the fact that the nucleotide sequence of the first half of the RNA encoded by a miRNA gene is an accurate or partial inversed-reversed sequence of the nucleotide sequence of the second half thereof.

[0869] An enzyme complex designated DICER COMPLEX, dices the VGAM65 folded precursor RNA, herein designated VGAM FOLDED PRECURSOR RNA, into VGAM65 RNA, herein designated VGAM RNA, a single stranded ˜22 nt long RNA segment. As is known in the art, dicing of a hairpin structured RNA precursor product into a short ˜22 nt RNA segment is catalyzed by an enzyme complex comprising an enzyme called Dicer together with other necessary proteins. A probable (over 86%) nucleotide sequence of VGAM65 RNA is designated SEQ ID:400, and is provided hereinbelow with reference to the sequence listing part.

[0870] VGAM65 host target gene, herein designated VGAM HOST TARGET GENE, encodes a corresponding messenger RNA, VGAM65 host target RNA, herein designated VGAM HOST TARGET RNA. VGAM65 host target RNA, herein designated VGAM HOST TARGET RNA, comprises three regions, as is typical of mRNA of a protein coding gene: a 5 untranslated region, a protein coding region and a 3 untranslated region, designated 5UTR, PROTEIN CODING and 3UTR respectively.

[0871] VGAM65 RNA, herein designated VGAM RNA, binds complementarily to one or more host target binding sites located in untranslated regions of VGAM65 host target RNA, herein designated VGAM HOST TARGET RNA. This complementary binding is due to the fact that the nucleotide sequence of VGAM65 RNA, herein designated VGAM RNA, is an accurate or a partial inversed-reversed sequence of the nucleotide sequence of each of the host target binding sites. As an illustration, FIG. 1 shows 3 such host target binding sites, designated BINDING SITE I, BINDING SITE II and BINDING SITE III respectively. It is appreciated that the number of host target binding sites shown in FIG. 1 is meant as an illustration only, and is not meant to be limiting VGAM65 RNA, herein designated VGAM RNA, may have a different number of host target binding sites in untranslated regions of a VGAM65 host target RNA, herein designated VGAM HOST TARGET RNA. It is further appreciated that while FIG. 1 depicts host target binding sites in the 3UTR region, this is meant as an example only these host target binding sites may be located in the 3UTR region, the 5UTR region, or in both 3UTR and 5UTR regions.

[0872] The complementary binding of VGAM65 RNA, herein designated VGAM RNA, to host target binding sites on VGAM65 host target RNA, herein designated VGAM HOST TARGET RNA, such as BINDING SITE I, BINDING SITE II and BINDING SITE III, inhibits translation of VGAM65 host target RNA, herein designated VGAM HOST TARGET RNA, into VGAM65 host target protein, herein designated VGAM HOST TARGET PROTEIN. VGAM host target protein is therefore outlined by a broken line.

[0873] It is appreciated that VGAM65 host target gene, herein designated VGAM HOST TARGET GENE, in fact represents a plurality of VGAM65 host target genes. The mRNA of each one of this plurality of VGAM65 host target genes comprises one or more host target binding sites, each having a nucleotide sequence which is at least partly complementary to VGAM65 RNA, herein designated VGAM RNA, and which when bound by VGAM65 RNA, herein designated VGAM RNA, causes inhibition of translation of respective one or more VGAM65 host target proteins.

[0874] It is further appreciated by one skilled in the art that the mode of translational inhibition illustrated by FIG. 1 with specific reference to translational inhibition exerted by VGAM65 gene, herein designated VGAM GENE, on one or more VGAM65 host target gene, herein designated VGAM HOST TARGET GENE, is in fact common to other known non-viral miRNA genes. As mentioned hereinabove with reference to the background section, although a specific complementary binding site has been demonstrated only for some of the known miRNA genes (primarily Lin-4 and Let-7), all other recently discovered miRNA genes are also believed by those skilled in the art to modulate expression of other genes by complementary binding, although specific complementary binding sites of these other miRNA genes have not yet been found (Ruvkun G., Perspective: Glimpses of a tiny RNA world, Science 294, 779 (2001)).

[0875] It is yet further appreciated that a function of VGAM65 is inhibition of expression of host target genes, as part of a novel viral mechanism of attacking a host. Accordingly, utilities of VGAM65 include diagnosis, prevention and treatment of viral infection by Vaccinia virus. Specific functions, and accordingly utilities, of VGAM65 correlate with, and may be deduced from, the identity of the host target genes which VGAM65 binds and inhibits, and the function of these host target genes, as elaborated hereinbelow.

[0876] Nucleotide sequences of the VGAM65 precursor RNA, herein designated VGAM PRECURSOR RNA, and of the diced VGAM65 RNA, herein designated VGAM RNA, and a schematic representation of the secondary folding of VGAM65 folded precursor RNA, herein designated VGAM FOLDED PRECURSOR RNA, of VGAM65 are further described hereinbelow with reference to Table 1.

[0877] Nucleotide sequences of host target binding sites, such as BINDING SITE-I, BINDING SITE-II and BINDING SITE-III of FIG. 1, found on, and schematic representation of the complementarity of each of these host target binding sites to VGAM65 RNA, herein designated VGAM RNA, are described hereinbelow with reference to Table 2.

[0878] FIG. 1 further provides a conceptual description of another novel bioinformatically detected viral gene of the present invention, referred to here as Viral Genomic Address Messenger 66 (VGAM66) viral gene, which modulates expression of respective host target genes thereof, the function and utility of which host target genes is known in the art.

[0879] VGAM66 is a novel bioinformatically detected regulatory, non protein coding, viral micro RNA (miRNA) gene. The method by which VGAM66 was detected is described hereinabove with reference to FIGS. 2-8.

[0880] VGAM66 gene, herein designated VGAM GENE, is a viral gene contained in the genome of Vaccinia virus. VGAM66 host target gene, herein designated VGAM HOST TARGET GENE, is a human gene contained in the human genome.

[0881] VGAM66 gene, herein designated VGAM GENE, encodes a VGAM66 precursor RNA, herein designated VGAM PRECURSOR RNA. Similar to other miRNA genes, and unlike most ordinary genes, VGAM66 precursor RNA, herein designated VGAM PRECURSOR RNA, does not encode a protein. A nucleotide sequence identical or highly similar to the nucleotide sequence of VGAM66 precursor RNA is designated SEQ ID:52, and is provided hereinbelow with reference to the sequence listing part. Nucleotide sequence SEQ ID:52 is located at position 12512 relative to the genome of Vaccinia virus.

[0882] VGAM66 precursor RNA, herein designated VGAM PRECURSOR RNA, folds onto itself, forming VGAM66 folded precursor RNA, herein designated VGAM FOLDED PRECURSOR RNA, which has a two-dimensional hairpin structure. As is well known in the art, this hairpin structure, is typical of RNA encoded by miRNA genes, and is due to the fact that the nucleotide sequence of the first half of the RNA encoded by a miRNA gene is an accurate or partial inversed-reversed sequence of the nucleotide sequence of the second half thereof.

[0883] An enzyme complex designated DICER COMPLEX, dices the VGAM66 folded precursor RNA, herein designated VGAM FOLDED PRECURSOR RNA, into VGAM66 RNA, herein designated VGAM RNA, a single stranded ˜22 nt long RNA segment. As is known in the art, dicing of a hairpin structured RNA precursor product into a short ˜22 nt RNA segment is catalyzed by an enzyme complex comprising an enzyme called Dicer together with other necessary proteins. A probable (over 79%) nucleotide sequence of VGAM66 RNA is designated SEQ ID:401, and is provided hereinbelow with reference to the sequence listing part.

[0884] VGAM66 host target gene, herein designated VGAM HOST TARGET GENE, encodes a corresponding messenger RNA, VGAM66 host target RNA, herein designated VGAM HOST TARGET RNA. VGAM66 host target RNA, herein designated VGAM HOST TARGET RNA, comprises three regions, as is typical of mRNA of a protein coding gene: a 5 untranslated region, a protein coding region and a 3 untranslated region, designated 5UTR, PROTEIN CODING and 3UTR respectively.

[0885] VGAM66 RNA, herein designated VGAM RNA, binds complementarily to one or more host target binding sites located in untranslated regions of VGAM66 host target RNA, herein designated VGAM HOST TARGET RNA. This complementary binding is due to the fact that the nucleotide sequence of VGAM66 RNA, herein designated VGAM RNA, is an accurate or a partial inversed-reversed sequence of the nucleotide sequence of each of the host target binding sites. As an illustration, FIG. 1 shows 3 such host target binding sites, designated BINDING SITE I, BINDING SITE II and BINDING SITE III respectively. It is appreciated that the number of host target binding sites shown in FIG. 1 is meant as an illustration only, and is not meant to be limiting VGAM66 RNA, herein designated VGAM RNA, may have a different number of host target binding sites in untranslated regions of a VGAM66 host target RNA, herein designated VGAM HOST TARGET RNA. It is further appreciated that while FIG. 1 depicts host target binding sites in the 3UTR region, this is meant as an example only these host target binding sites may be located in the 3UTR region, the 5UTR region, or in both 3UTR and 5UTR regions.

[0886] The complementary binding of VGAM66 RNA, herein designated VGAM RNA, to host target binding sites on VGAM66 host target RNA, herein designated VGAM HOST TARGET RNA, such as BINDING SITE I, BINDING SITE II and BINDING SITE III, inhibits translation of VGAM66 host target RNA, herein designated VGAM HOST TARGET RNA, into VGAM66 host target protein, herein designated VGAM HOST TARGET PROTEIN. VGAM host target protein is therefore outlined by a broken line.

[0887] It is appreciated that VGAM66 host target gene, herein designated VGAM HOST TARGET GENE, in fact represents a plurality of VGAM66 host target genes. The mRNA of each one of this plurality of VGAM66 host target genes comprises one or more host target binding sites, each having a nucleotide sequence which is at least partly complementary to VGAM66 RNA, herein designated VGAM RNA, and which when bound by VGAM66 RNA, herein designated VGAM RNA, causes inhibition of translation of respective one or more VGAM66 host target proteins.

[0888] It is further appreciated by one skilled in the art that the mode of translational inhibition illustrated by FIG. 1 with specific reference to translational inhibition exerted by VGAM66 gene, herein designated VGAM GENE, on one or more VGAM66 host target gene, herein designated VGAM HOST TARGET GENE, is in fact common to other known non-viral miRNA genes. As mentioned hereinabove with reference to the background section, although a specific complementary binding site has been demonstrated only for some of the known miRNA genes (primarily Lin-4 and Let-7), all other recently discovered miRNA genes are also believed by those skilled in the art to modulate expression of other genes by complementary binding, although specific complementary binding sites of these other miRNA genes have not yet been found (Ruvkun G., Perspective: Glimpses of a tiny RNA world, Science 294, 779 (2001)).

[0889] It is yet further appreciated that a function of VGAM66 is inhibition of expression of host target genes, as part of a novel viral mechanism of attacking a host. Accordingly, utilities of VGAM66 include diagnosis, prevention and treatment of viral infection by Vaccinia virus. Specific functions, and accordingly utilities, of VGAM66 correlate with, and may be deduced from, the identity of the host target genes which VGAM66 binds and inhibits, and the function of these host target genes, as elaborated hereinbelow.

[0890] Nucleotide sequences of the VGAM66 precursor RNA, herein designated VGAM PRECURSOR RNA, and of the diced VGAM66 RNA, herein designated VGAM RNA, and a schematic representation of the secondary folding of VGAM66 folded precursor RNA, herein designated VGAM FOLDED PRECURSOR RNA, of VGAM66 are further described hereinbelow with reference to Table 1.

[0891] Nucleotide sequences of host target binding sites, such as BINDING SITE-I, BINDING SITE-II and BINDING SITE-III of FIG. 1, found on, and schematic representation of the complementarity of each of these host target binding sites to VGAM66 RNA, herein designated VGAM RNA, are described hereinbelow with reference to Table 2.

[0892] FIG. 1 further provides a conceptual description of another novel bioinformatically detected viral gene of the present invention, referred to here as Viral Genomic Address Messenger 67 (VGAM67) viral gene, which modulates expression of respective host target genes thereof, the function and utility of which host target genes is known in the art.

[0893] VGAM67 is a novel bioinformatically detected regulatory, non protein coding, viral micro RNA (miRNA) gene. The method by which VGAM67 was detected is described hereinabove with reference to FIGS. 2-8.

[0894] VGAM67 gene, herein designated VGAM GENE, is a viral gene contained in the genome of Vaccinia virus. VGAM67 host target gene, herein designated VGAM HOST TARGET GENE, is a human gene contained in the human genome.

[0895] VGAM67 gene, herein designated VGAM GENE, encodes a VGAM67 precursor RNA, herein designated VGAM PRECURSOR RNA. Similar to other miRNA genes, and unlike most ordinary genes, VGAM67 precursor RNA, herein designated VGAM PRECURSOR RNA, does not encode a protein. A nucleotide sequence identical or highly similar to the nucleotide sequence of VGAM67 precursor RNA is designated SEQ ID:53, and is provided hereinbelow with reference to the sequence listing part. Nucleotide sequence SEQ ID:53 is located at position 12981 relative to the genome of Vaccinia virus.

[0896] VGAM67 precursor RNA, herein designated VGAM PRECURSOR RNA, folds onto itself, forming VGAM67 folded precursor RNA, herein designated VGAM FOLDED PRECURSOR RNA, which has a two-dimensional hairpin structure. As is well known in the art, this hairpin structure, is typical of RNA encoded by miRNA genes, and is due to the fact that the nucleotide sequence of the first half of the RNA encoded by a miRNA gene is an accurate or partial inversed-reversed sequence of the nucleotide sequence of the second half thereof.

[0897] An enzyme complex designated DICER COMPLEX, dices the VGAM67 folded precursor RNA, herein designated VGAM FOLDED PRECURSOR RNA, into VGAM67 RNA, herein designated VGAM RNA, a single stranded ˜22 nt long RNA segment. As is known in the art, dicing of a hairpin structured RNA precursor product into a short ˜22 nt RNA segment is catalyzed by an enzyme complex comprising an enzyme called Dicer together with other necessary proteins. A probable (over 73%) nucleotide sequence of VGAM67 RNA is designated SEQ ID:402, and is provided hereinbelow with reference to the sequence listing part.

[0898] VGAM67 host target gene, herein designated VGAM HOST TARGET GENE, encodes a corresponding messenger RNA, VGAM67 host target RNA, herein designated VGAM HOST TARGET RNA. VGAM67 host target RNA, herein designated VGAM HOST TARGET RNA, comprises three regions, as is typical of mRNA of a protein coding gene: a 5 untranslated region, a protein coding region and a 3 untranslated region, designated 5UTR, PROTEIN CODING and 3UTR respectively.

[0899] VGAM67 RNA, herein designated VGAM RNA, binds complementarily to one or more host target binding sites located in untranslated regions of VGAM67 host target RNA, herein designated VGAM HOST TARGET RNA. This complementary binding is due to the fact that the nucleotide sequence of VGAM67 RNA, herein designated VGAM RNA, is an accurate or a partial inversed-reversed sequence of the nucleotide sequence of each of the host target binding sites. As an illustration, FIG. 1 shows 3 such host target binding sites, designated BINDING SITE I, BINDING SITE II and BINDING SITE III respectively. It is appreciated that the number of host target binding sites shown in FIG. 1 is meant as an illustration only, and is not meant to be limiting VGAM67 RNA, herein designated VGAM RNA, may have a different number of host target binding sites in untranslated regions of a VGAM67 host target RNA, herein designated VGAM HOST TARGET RNA. It is further appreciated that while FIG. 1 depicts host target binding sites in the 3UTR region, this is meant as an example only these host target binding sites may be located in the 3UTR region, the 5UTR region, or in both 3UTR and 5UTR regions.

[0900] The complementary binding of VGAM67 RNA, herein designated VGAM RNA, to host target binding sites on VGAM67 host target RNA, herein designated VGAM HOST TARGET RNA, such as BINDING SITE I, BINDING SITE II and BINDING SITE III, inhibits translation of VGAM67 host target RNA, herein designated VGAM HOST TARGET RNA, into VGAM67 host target protein, herein designated VGAM HOST TARGET PROTEIN. VGAM host target protein is therefore outlined by a broken line.

[0901] It is appreciated that VGAM67 host target gene, herein designated VGAM HOST TARGET GENE, in fact represents a plurality of VGAM67 host target genes. The mRNA of each one of this plurality of VGAM67 host target genes comprises one or more host target binding sites, each having a nucleotide sequence which is at least partly complementary to VGAM67 RNA, herein designated VGAM RNA, and which when bound by VGAM67 RNA, herein designated VGAM RNA, causes inhibition of translation of respective one or more VGAM67 host target proteins.

[0902] It is further appreciated by one skilled in the art that the mode of translational inhibition illustrated by FIG. 1 with specific reference to translational inhibition exerted by VGAM67 gene, herein designated VGAM GENE, on one or more VGAM67 host target gene, herein designated VGAM HOST TARGET GENE, is in fact common to other known non-viral miRNA genes. As mentioned hereinabove with reference to the background section, although a specific complementary binding site has been demonstrated only for some of the known miRNA genes (primarily Lin-4 and Let-7), all other recently discovered miRNA genes are also believed by those skilled in the art to modulate expression of other genes by complementary binding, although specific complementary binding sites of these other miRNA genes have not yet been found (Ruvkun G., Perspective: Glimpses of a tiny RNA world, Science 294, 779 (2001)).

[0903] It is yet further appreciated that a function of VGAM67 is inhibition of expression of host target genes, as part of a novel viral mechanism of attacking a host. Accordingly, utilities of VGAM67 include diagnosis, prevention and treatment of viral infection by Vaccinia virus. Specific functions, and accordingly utilities, of VGAM67 correlate with, and may be deduced from, the identity of the host target genes which VGAM67 binds and inhibits, and the function of these host target genes, as elaborated hereinbelow.

[0904] Nucleotide sequences of the VGAM67 precursor RNA, herein designated VGAM PRECURSOR RNA, and of the diced VGAM67 RNA, herein designated VGAM RNA, and a schematic representation of the secondary folding of VGAM67 folded precursor RNA, herein designated VGAM FOLDED PRECURSOR RNA, of VGAM67 are further described hereinbelow with reference to Table 1.

[0905] Nucleotide sequences of host target binding sites, such as BINDING SITE-I, BINDING SITE-II and BINDING SITE-III of FIG. 1, found on, and schematic representation of the complementarity of each of these host target binding sites to VGAM67 RNA, herein designated VGAM RNA, are described hereinbelow with reference to Table 2.

[0906] FIG. 1 further provides a conceptual description of another novel bioinformatically detected viral gene of the present invention, referred to here as Viral Genomic Address Messenger 68 (VGAM68) viral gene, which modulates expression of respective host target genes thereof, the function and utility of which host target genes is known in the art.

[0907] VGAM68 is a novel bioinformatically detected regulatory, non protein coding, viral micro RNA (miRNA) gene. The method by which VGAM68 was detected is described hereinabove with reference to FIGS. 2-8.

[0908] VGAM68 gene, herein designated VGAM GENE, is a viral gene contained in the genome of Vaccinia virus. VGAM68 host target gene, herein designated VGAM HOST TARGET GENE, is a human gene contained in the human genome.

[0909] VGAM68 gene, herein designated VGAM GENE, encodes a VGAM68 precursor RNA, herein designated VGAM PRECURSOR RNA. Similar to other miRNA genes, and unlike most ordinary genes, VGAM68 precursor RNA, herein designated VGAM PRECURSOR RNA, does not encode a protein. A nucleotide sequence identical or highly similar to the nucleotide sequence of VGAM68 precursor RNA is designated SEQ ID:54, and is provided hereinbelow with reference to the sequence listing part. Nucleotide sequence SEQ ID:54 is located at position 10620 relative to the genome of Vaccinia virus.

[0910] VGAM68 precursor RNA, herein designated VGAM PRECURSOR RNA, folds onto itself, forming VGAM68 folded precursor RNA, herein designated VGAM FOLDED PRECURSOR RNA, which has a two-dimensional hairpin structure. As is well known in the art, this hairpin structure, is typical of RNA encoded by miRNA genes, and is due to the fact that the nucleotide sequence of the first half of the RNA encoded by a miRNA gene is an accurate or partial inversed-reversed sequence of the nucleotide sequence of the second half thereof.

[0911] An enzyme complex designated DICER COMPLEX, dices the VGAM68 folded precursor RNA, herein designated VGAM FOLDED PRECURSOR RNA, into VGAM68 RNA, herein designated VGAM RNA, a single stranded ˜22 nt long RNA segment. As is known in the art, dicing of a hairpin structured RNA precursor product into a short ˜22 nt RNA segment is catalyzed by an enzyme complex comprising an enzyme called Dicer together with other necessary proteins. A probable (over 86%) nucleotide sequence of VGAM68 RNA is designated SEQ ID:403, and is provided hereinbelow with reference to the sequence listing part.

[0912] VGAM68 host target gene, herein designated VGAM HOST TARGET GENE, encodes a corresponding messenger RNA, VGAM68 host target RNA, herein designated VGAM HOST TARGET RNA. VGAM68 host target RNA, herein designated VGAM HOST TARGET RNA, comprises three regions, as is typical of mRNA of a protein coding gene: a 5 untranslated region, a protein coding region and a 3 untranslated region, designated 5UTR, PROTEIN CODING and 3UTR respectively.

[0913] VGAM68 RNA, herein designated VGAM RNA, binds complementarily to one or more host target binding sites located in untranslated regions of VGAM68 host target RNA, herein designated VGAM HOST TARGET RNA. This complementary binding is due to the fact that the nucleotide sequence of VGAM68 RNA, herein designated VGAM RNA, is an accurate or a partial inversed-reversed sequence of the nucleotide sequence of each of the host target binding sites. As an illustration, FIG. 1 shows 3 such host target binding sites, designated BINDING SITE I, BINDING SITE II and BINDING SITE III respectively. It is appreciated that the number of host target binding sites shown in FIG. 1 is meant as an illustration only, and is not meant to be limiting VGAM68 RNA, herein designated VGAM RNA, may have a different number of host target binding sites in untranslated regions of a VGAM68 host target RNA, herein designated VGAM HOST TARGET RNA. It is further appreciated that while FIG. 1 depicts host target binding sites in the 3UTR region, this is meant as an example only these host target binding sites may be located in the 3UTR region, the 5UTR region, or in both 3UTR and 5UTR regions.

[0914] The complementary binding of VGAM68 RNA, herein designated VGAM RNA, to host target binding sites on VGAM68 host target RNA, herein designated VGAM HOST TARGET RNA, such as BINDING SITE I, BINDING SITE II and BINDING SITE III, inhibits translation of VGAM68 host target RNA, herein designated VGAM HOST TARGET RNA, into VGAM68 host target protein, herein designated VGAM HOST TARGET PROTEIN. VGAM host target protein is therefore outlined by a broken line.

[0915] It is appreciated that VGAM68 host target gene, herein designated VGAM HOST TARGET GENE, in fact represents a plurality of VGAM68 host target genes. The mRNA of each one of this plurality of VGAM68 host target genes comprises one or more host target binding sites, each having a nucleotide sequence which is at least partly complementary to VGAM68 RNA, herein designated VGAM RNA, and which when bound by VGAM68 RNA, herein designated VGAM RNA, causes inhibition of translation of respective one or more VGAM68 host target proteins.

[0916] It is further appreciated by one skilled in the art that the mode of translational inhibition illustrated by FIG. 1 with specific reference to translational inhibition exerted by VGAM68 gene, herein designated VGAM GENE, on one or more VGAM68 host target gene, herein designated VGAM HOST TARGET GENE, is in fact common to other known non-viral miRNA genes. As mentioned hereinabove with reference to the background section, although a specific complementary binding site has been demonstrated only for some of the known miRNA genes (primarily Lin-4 and Let-7), all other recently discovered miRNA genes are also believed by those skilled in the art to modulate expression of other genes by complementary binding, although specific complementary binding sites of these other miRNA genes have not yet been found (Ruvkun G., Perspective: Glimpses of a tiny RNA world, Science 294, 779 (2001)).

[0917] It is yet further appreciated that a function of VGAM68 is inhibition of expression of host target genes, as part of a novel viral mechanism of attacking a host. Accordingly, utilities of VGAM68 include diagnosis, prevention and treatment of viral infection by Vaccinia virus. Specific functions, and accordingly utilities, of VGAM68 correlate with, and may be deduced from, the identity of the host target genes which VGAM68 binds and inhibits, and the function of these host target genes, as elaborated hereinbelow.

[0918] Nucleotide sequences of the VGAM68 precursor RNA, herein designated VGAM PRECURSOR RNA, and of the diced VGAM68 RNA, herein designated VGAM RNA, and a schematic representation of the secondary folding of VGAM68 folded precursor RNA, herein designated VGAM FOLDED PRECURSOR RNA, of VGAM68 are further described hereinbelow with reference to Table 1.

[0919] Nucleotide sequences of host target binding sites, such as BINDING SITE-I, BINDING SITE-II and BINDING SITE-III of FIG. 1, found on, and schematic representation of the complementarity of each of these host target binding sites to VGAM68 RNA, herein designated VGAM RNA, are described hereinbelow with reference to Table 2.

[0920] FIG. 1 further provides a conceptual description of another novel bioinformatically detected viral gene of the present invention, referred to here as Viral Genomic Address Messenger 69 (VGAM69) viral gene, which modulates expression of respective host target genes thereof, the function and utility of which host target genes is known in the art.

[0921] VGAM69 is a novel bioinformatically detected regulatory, non protein coding, viral micro RNA (miRNA) gene. The method by which VGAM69 was detected is described hereinabove with reference to FIGS. 2-8.

[0922] VGAM69 gene, herein designated VGAM GENE, is a viral gene contained in the genome of Vaccinia virus. VGAM69 host target gene, herein designated VGAM HOST TARGET GENE, is a human gene contained in the human genome.

[0923] VGAM69 gene, herein designated VGAM GENE, encodes a VGAM69 precursor RNA, herein designated VGAM PRECURSOR RNA. Similar to other miRNA genes, and unlike most ordinary genes, VGAM69 precursor RNA, herein designated VGAM PRECURSOR RNA, does not encode a protein. A nucleotide sequence identical or highly similar to the nucleotide sequence of VGAM69 precursor RNA is designated SEQ ID: 55, and is provided hereinbelow with reference to the sequence listing part. Nucleotide sequence SEQ ID:55 is located at position 180452 relative to the genome of Vaccinia virus.

[0924] VGAM69 precursor RNA, herein designated VGAM PRECURSOR RNA, folds onto itself, forming VGAM69 folded precursor RNA, herein designated VGAM FOLDED PRECURSOR RNA, which has a two-dimensional hairpin structure. As is well known in the art, this hairpin structure, is typical of RNA encoded by miRNA genes, and is due to the fact that the nucleotide sequence of the first half of the RNA encoded by a miRNA gene is an accurate or partial inversed-reversed sequence of the nucleotide sequence of the second half thereof.

[0925] An enzyme complex designated DICER COMPLEX, dices the VGAM69 folded precursor RNA, herein designated VGAM FOLDED PRECURSOR RNA, into VGAM69 RNA, herein designated VGAM RNA, a single stranded ˜22 nt long RNA segment. As is known in the art, dicing of a hairpin structured RNA precursor product into a short ˜22 nt RNA segment is catalyzed by an enzyme complex comprising an enzyme called Dicer together with other necessary proteins. A probable (over 85%) nucleotide sequence of VGAM69 RNA is designated SEQ ID:404, and is provided hereinbelow with reference to the sequence listing part.

[0926] VGAM69 host target gene, herein designated VGAM HOST TARGET GENE, encodes a corresponding messenger RNA, VGAM69 host target RNA, herein designated VGAM HOST TARGET RNA. VGAM69 host target RNA, herein designated VGAM HOST TARGET RNA, comprises three regions, as is typical of mRNA of a protein coding gene: a 5 untranslated region, a protein coding region and a 3 untranslated region, designated 5UTR, PROTEIN CODING and 3UTR respectively.

[0927] VGAM69 RNA, herein designated VGAM RNA, binds complementarily to one or more host target binding sites located in untranslated regions of VGAM69 host target RNA, herein designated VGAM HOST TARGET RNA. This complementary binding is due to the fact that the nucleotide sequence of VGAM69 RNA, herein designated VGAM RNA, is an accurate or a partial inversed-reversed sequence of the nucleotide sequence of each of the host target binding sites. As an illustration, FIG. 1 shows 3 such host target binding sites, designated BINDING SITE I, BINDING SITE II and BINDING SITE III respectively. It is appreciated that the number of host target binding sites shown in FIG. 1 is meant as an illustration only, and is not meant to be limiting VGAM69 RNA, herein designated VGAM RNA, may have a different number of host target binding sites in untranslated regions of a VGAM69 host target RNA, herein designated VGAM HOST TARGET RNA. It is further appreciated that while FIG. 1 depicts host target binding sites in the 3UTR region, this is meant as an example only these host target binding sites may be located in the 3UTR region, the 5UTR region, or in both 3UTR and 5UTR regions.

[0928] The complementary binding of VGAM69 RNA, herein designated VGAM RNA, to host target binding sites on VGAM69 host target RNA, herein designated VGAM HOST TARGET RNA, such as BINDING SITE I, BINDING SITE II and BINDING SITE III, inhibits translation of VGAM69 host target RNA, herein designated VGAM HOST TARGET RNA, into VGAM69 host target protein, herein designated VGAM HOST TARGET PROTEIN. VGAM host target protein is therefore outlined by a broken line.

[0929] It is appreciated that VGAM69 host target gene, herein designated VGAM HOST TARGET GENE, in fact represents a plurality of VGAM69 host target genes. The mRNA of each one of this plurality of VGAM69 host target genes comprises one or more host target binding sites, each having a nucleotide sequence which is at least partly complementary to VGAM69 RNA, herein designated VGAM RNA, and which when bound by VGAM69 RNA, herein designated VGAM RNA, causes inhibition of translation of respective one or more VGAM69 host target proteins.

[0930] It is further appreciated by one skilled in the art that the mode of translational inhibition illustrated by FIG. 1 with specific reference to translational inhibition exerted by VGAM69 gene, herein designated VGAM GENE, on one or more VGAM69 host target gene, herein designated VGAM HOST TARGET GENE, is in fact common to other known non-viral miRNA genes. As mentioned hereinabove with reference to the background section, although a specific complementary binding site has been demonstrated only for some of the known miRNA genes (primarily Lin-4 and Let-7), all other recently discovered miRNA genes are also believed by those skilled in the art to modulate expression of other genes by complementary binding, although specific complementary binding sites of these other miRNA genes have not yet been found (Ruvkun G., Perspective: Glimpses of a tiny RNA world, Science 294, 779 (2001)).

[0931] It is yet further appreciated that a function of VGAM69 is inhibition of expression of host target genes, as part of a novel viral mechanism of attacking a host. Accordingly, utilities of VGAM69 include diagnosis, prevention and treatment of viral infection by Vaccinia virus. Specific functions, and accordingly utilities, of VGAM69 correlate with, and may be deduced from, the identity of the host target genes which VGAM69 binds and inhibits, and the function of these host target genes, as elaborated hereinbelow.

[0932] Nucleotide sequences of the VGAM69 precursor RNA, herein designated VGAM PRECURSOR RNA, and of the diced VGAM69 RNA, herein designated VGAM RNA, and a schematic representation of the secondary folding of VGAM69 folded precursor RNA, herein designated VGAM FOLDED PRECURSOR RNA, of VGAM69 are further described hereinbelow with reference to Table 1.

[0933] Nucleotide sequences of host target binding sites, such as BINDING SITE-I, BINDING SITE-II and BINDING SITE-III of FIG. 1, found on, and schematic representation of the complementarity of each of these host target binding sites to VGAM69 RNA, herein designated VGAM RNA, are described hereinbelow with reference to Table 2.

[0934] FIG. 1 further provides a conceptual description of another novel bioinformatically detected viral gene of the present invention, referred to here as Viral Genomic Address Messenger 70 (VGAM70) viral gene, which modulates expression of respective host target genes thereof, the function and utility of which host target genes is known in the art.

[0935] VGAM70 is a novel bioinformatically detected regulatory, non protein coding, viral micro RNA (miRNA) gene. The method by which VGAM70 was detected is described hereinabove with reference to FIGS. 2-8.

[0936] VGAM70 gene, herein designated VGAM GENE, is a viral gene contained in the genome of Vaccinia virus. VGAM70 host target gene, herein designated VGAM HOST TARGET GENE, is a human gene contained in the human genome.

[0937] VGAM70 gene, herein designated VGAM GENE, encodes a VGAM70 precursor RNA, herein designated VGAM PRECURSOR RNA. Similar to other miRNA genes, and unlike most ordinary genes, VGAM70 precursor RNA, herein designated VGAM PRECURSOR RNA, does not encode a protein. A nucleotide sequence identical or highly similar to the nucleotide sequence of VGAM70 precursor RNA is designated SEQ ID:56, and is provided hereinbelow with reference to the sequence listing part. Nucleotide sequence SEQ ID:56 is located at position 12513 relative to the genome of Vaccinia virus.

[0938] VGAM70 precursor RNA, herein designated VGAM PRECURSOR RNA, folds onto itself, forming VGAM70 folded precursor RNA, herein designated VGAM FOLDED PRECURSOR RNA, which has a two-dimensional hairpin structure. As is well known in the art, this hairpin structure, is typical of RNA encoded by miRNA genes, and is due to the fact that the nucleotide sequence of the first half of the RNA encoded by a miRNA gene is an accurate or partial inversed-reversed sequence of the nucleotide sequence of the second half thereof.

[0939] An enzyme complex designated DICER COMPLEX, dices the VGAM70 folded precursor RNA, herein designated VGAM FOLDED PRECURSOR RNA, into VGAM70 RNA, herein designated VGAM RNA, a single stranded ˜22 nt long RNA segment. As is known in the art, dicing of a hairpin structured RNA precursor product into a short ˜22 nt RNA segment is catalyzed by an enzyme complex comprising an enzyme called Dicer together with other necessary proteins. A probable (over 77%) nucleotide sequence of VGAM70 RNA is designated SEQ ID:405, and is provided hereinbelow with reference to the sequence listing part.

[0940] VGAM70 host target gene, herein designated VGAM HOST TARGET GENE, encodes a corresponding messenger RNA, VGAM70 host target RNA, herein designated VGAM HOST TARGET RNA. VGAM70 host target RNA, herein designated VGAM HOST TARGET RNA, comprises three regions, as is typical of mRNA of a protein coding gene: a 5 untranslated region, a protein coding region and a 3 untranslated region, designated 5UTR, PROTEIN CODING and 3UTR respectively.

[0941] VGAM70 RNA, herein designated VGAM RNA, binds complementarily to one or more host target binding sites located in untranslated regions of VGAM70 host target RNA, herein designated VGAM HOST TARGET RNA. This complementary binding is due to the fact that the nucleotide sequence of VGAM70 RNA, herein designated VGAM RNA, is an accurate or a partial inversed-reversed sequence of the nucleotide sequence of each of the host target binding sites. As an illustration, FIG. 1 shows 3 such host target binding sites, designated BINDING SITE I, BINDING SITE II and BINDING SITE III respectively. It is appreciated that the number of host target binding sites shown in FIG. 1 is meant as an illustration only, and is not meant to be limiting VGAM70 RNA, herein designated VGAM RNA, may have a different number of host target binding sites in untranslated regions of a VGAM70 host target RNA, herein designated VGAM HOST TARGET RNA. It is further appreciated that while FIG. 1 depicts host target binding sites in the 3UTR region, this is meant as an example only these host target binding sites may be located in the 3UTR region, the 5UTR region, or in both 3UTR and 5UTR regions.

[0942] The complementary binding of VGAM70 RNA, herein designated VGAM RNA, to host target binding sites on VGAM70 host target RNA, herein designated VGAM HOST TARGET RNA, such as BINDING SITE I, BINDING SITE II and BINDING SITE III, inhibits translation of VGAM70 host target RNA, herein designated VGAM HOST TARGET RNA, into VGAM70 host target protein, herein designated VGAM HOST TARGET PROTEIN. VGAM host target protein is therefore outlined by a broken line.

[0943] It is appreciated that VGAM70 host target gene, herein designated VGAM HOST TARGET GENE, in fact represents a plurality of VGAM70 host target genes. The mRNA of each one of this plurality of VGAM70 host target genes comprises one or more host target binding sites, each having a nucleotide sequence which is at least partly complementary to VGAM70 RNA, herein designated VGAM RNA, and which when bound by VGAM70 RNA, herein designated VGAM RNA, causes inhibition of translation of respective one or more VGAM70 host target proteins.

[0944] It is further appreciated by one skilled in the art that the mode of translational inhibition illustrated by FIG. 1 with specific reference to translational inhibition exerted by VGAM70 gene, herein designated VGAM GENE, on one or more VGAM70 host target gene, herein designated VGAM HOST TARGET GENE, is in fact common to other known non-viral miRNA genes. As mentioned hereinabove with reference to the background section, although a specific complementary binding site has been demonstrated only for some of the known miRNA genes (primarily Lin-4 and Let-7), all other recently discovered miRNA genes are also believed by those skilled in the art to modulate expression of other genes by complementary binding, although specific complementary binding sites of these other miRNA genes have not yet been found (Ruvkun G., Perspective: Glimpses of a tiny RNA world, Science 294, 779 (2001)).

[0945] It is yet further appreciated that a function of VGAM70 is inhibition of expression of host target genes, as part of a novel viral mechanism of attacking a host. Accordingly, utilities of VGAM70 include diagnosis, prevention and treatment of viral infection by Vaccinia virus. Specific functions, and accordingly utilities, of VGAM70 correlate with, and may be deduced from, the identity of the host target genes which VGAM70 binds and inhibits, and the function of these host target genes, as elaborated hereinbelow.

[0946] Nucleotide sequences of the VGAM70 precursor RNA, herein designated VGAM PRECURSOR RNA, and of the diced VGAM70 RNA, herein designated VGAM RNA, and a schematic representation of the secondary folding of VGAM70 folded precursor RNA, herein designated VGAM FOLDED PRECURSOR RNA, of VGAM70 are further described hereinbelow with reference to Table 1.

[0947] Nucleotide sequences of host target binding sites, such as BINDING SITE-I, BINDING SITE-II and BINDING SITE-III of FIG. 1, found on, and schematic representation of the complementarity of each of these host target binding sites to VGAM70 RNA, herein designated VGAM RNA, are described hereinbelow with reference to Table 2.

[0948] FIG. 1 further provides a conceptual description of another novel bioinformatically detected viral gene of the present invention, referred to here as Viral Genomic Address Messenger 71 (VGAM71) viral gene, which modulates expression of respective host target genes thereof, the function and utility of which host target genes is known in the art.

[0949] VGAM71 is a novel bioinformatically detected regulatory, non protein coding, viral micro RNA (miRNA) gene. The method by which VGAM71 was detected is described hereinabove with reference to FIGS. 2-8.

[0950] VGAM71 gene, herein designated VGAM GENE, is a viral gene contained in the genome of Vaccinia virus. VGAM71 host target gene, herein designated VGAM HOST TARGET GENE, is a human gene contained in the human genome.

[0951] VGAM71 gene, herein designated VGAM GENE, encodes a VGAM71 precursor RNA, herein designated VGAM PRECURSOR RNA. Similar to other miRNA genes, and unlike most ordinary genes, VGAM71 precursor RNA, herein designated VGAM PRECURSOR RNA, does not encode a protein. A nucleotide sequence identical or highly similar to the nucleotide sequence of VGAM71 precursor RNA is designated SEQ ID:57, and is provided hereinbelow with reference to the sequence listing part. Nucleotide sequence SEQ ID:57 is located at position 14150 relative to the genome of Vaccinia virus.

[0952] VGAM71 precursor RNA, herein designated VGAM PRECURSOR RNA, folds onto itself, forming VGAM71 folded precursor RNA, herein designated VGAM FOLDED PRECURSOR RNA, which has a two-dimensional hairpin structure. As is well known in the art, this hairpin structure, is typical of RNA encoded by miRNA genes, and is due to the fact that the nucleotide sequence of the first half of the RNA encoded by a miRNA gene is an accurate or partial inversed-reversed sequence of the nucleotide sequence of the second half thereof.

[0953] An enzyme complex designated DICER COMPLEX, dices the VGAM71 folded precursor RNA, herein designated VGAM FOLDED PRECURSOR RNA, into VGAM71 RNA, herein designated VGAM RNA, a single stranded ˜22 nt long RNA segment. As is known in the art, dicing of a hairpin structured RNA precursor product into a short ˜22 nt RNA segment is catalyzed by an enzyme complex comprising an enzyme called Dicer together with other necessary proteins. A probable (over 87%) nucleotide sequence of VGAM71 RNA is designated SEQ ID:406, and is provided hereinbelow with reference to the sequence listing part.

[0954] VGAM71 host target gene, herein designated VGAM HOST TARGET GENE, encodes a corresponding messenger RNA, VGAM71 host target RNA, herein designated VGAM HOST TARGET RNA. VGAM71 host target RNA, herein designated VGAM HOST TARGET RNA, comprises three regions, as is typical of mRNA of a protein coding gene: a 5 untranslated region, a protein coding region and a 3 untranslated region, designated 5UTR, PROTEIN CODING and 3UTR respectively.

[0955] VGAM71 RNA, herein designated VGAM RNA, binds complementarily to one or more host target binding sites located in untranslated regions of VGAM71 host target RNA, herein designated VGAM HOST TARGET RNA. This complementary binding is due to the fact that the nucleotide sequence of VGAM71 RNA, herein designated VGAM RNA, is an accurate or a partial inversed-reversed sequence of the nucleotide sequence of each of the host target binding sites. As an illustration, FIG. 1 shows 3 such host target binding sites, designated BINDING SITE I, BINDING SITE II and BINDING SITE III respectively. It is appreciated that the number of host target binding sites shown in FIG. 1 is meant as an illustration only, and is not meant to be limiting VGAM71 RNA, herein designated VGAM RNA, may have a different number of host target binding sites in untranslated regions of a VGAM71 host target RNA, herein designated VGAM HOST TARGET RNA. It is further appreciated that while FIG. 1 depicts host target binding sites in the 3UTR region, this is meant as an example only these host target binding sites may be located in the 3UTR region, the 5UTR region, or in both 3UTR and 5UTR regions.

[0956] The complementary binding of VGAM71 RNA, herein designated VGAM RNA, to host target binding sites on VGAM71 host target RNA, herein designated VGAM HOST TARGET RNA, such as BINDING SITE I, BINDING SITE II and BINDING SITE III, inhibits translation of VGAM71 host target RNA, herein designated VGAM HOST TARGET RNA, into VGAM71 host target protein, herein designated VGAM HOST TARGET PROTEIN. VGAM host target protein is therefore outlined by a broken line.

[0957] It is appreciated that VGAM71 host target gene, herein designated VGAM HOST TARGET GENE, in fact represents a plurality of VGAM71 host target genes. The mRNA of each one of this plurality of VGAM71 host target genes comprises one or more host target binding sites, each having a nucleotide sequence which is at least partly complementary to VGAM71 RNA, herein designated VGAM RNA, and which when bound by VGAM71 RNA, herein designated VGAM RNA, causes inhibition of translation of respective one or more VGAM71 host target proteins.

[0958] It is further appreciated by one skilled in the art that the mode of translational inhibition illustrated by FIG. 1 with specific reference to translational inhibition exerted by VGAM71 gene, herein designated VGAM GENE, on one or more VGAM71 host target gene, herein designated VGAM HOST TARGET GENE, is in fact common to other known non-viral miRNA genes. As mentioned hereinabove with reference to the background section, although a specific complementary binding site has been demonstrated only for some of the known miRNA genes (primarily Lin-4 and Let-7), all other recently discovered miRNA genes are also believed by those skilled in the art to modulate expression of other genes by complementary binding, although specific complementary binding sites of these other miRNA genes have not yet been found (Ruvkun G., Perspective: Glimpses of a tiny RNA world, Science 294, 779 (2001)).

[0959] It is yet further appreciated that a function of VGAM71 is inhibition of expression of host target genes, as part of a novel viral mechanism of attacking a host. Accordingly, utilities of VGAM71 include diagnosis, prevention and treatment of viral infection by Vaccinia virus. Specific functions, and accordingly utilities, of VGAM71 correlate with, and may be deduced from, the identity of the host target genes which VGAM71 binds and inhibits, and the function of these host target genes, as elaborated hereinbelow.

[0960] Nucleotide sequences of the VGAM71 precursor RNA, herein designated VGAM PRECURSOR RNA, and of the diced VGAM71 RNA, herein designated VGAM RNA, and a schematic representation of the secondary folding of VGAM71 folded precursor RNA, herein designated VGAM FOLDED PRECURSOR RNA, of VGAM71 are further described hereinbelow with reference to Table 1.

[0961] Nucleotide sequences of host target binding sites, such as BINDING SITE-I, BINDING SITE-II and BINDING SITE-III of FIG. 1, found on, and schematic representation of the complementarity of each of these host target binding sites to VGAM71 RNA, herein designated VGAM RNA, are described hereinbelow with reference to Table 2.

[0962] FIG. 1 further provides a conceptual description of another novel bioinformatically detected viral gene of the present invention, referred to here as Viral Genomic Address Messenger 72 (VGAM72) viral gene, which modulates expression of respective host target genes thereof, the function and utility of which host target genes is known in the art.

[0963] VGAM72 is a novel bioinformatically detected regulatory, non protein coding, viral micro RNA (miRNA) gene. The method by which VGAM72 was detected is described hereinabove with reference to FIGS. 2-8.

[0964] VGAM72 gene, herein designated VGAM GENE, is a viral gene contained in the genome of Vaccinia virus. VGAM72 host target gene, herein designated VGAM HOST TARGET GENE, is a human gene contained in the human genome.

[0965] VGAM72 gene, herein designated VGAM GENE, encodes a VGAM72 precursor RNA, herein designated VGAM PRECURSOR RNA. Similar to other miRNA genes, and unlike most ordinary genes, VGAM72 precursor RNA, herein designated VGAM PRECURSOR RNA, does not encode a protein. A nucleotide sequence identical or highly similar to the nucleotide sequence of VGAM72 precursor RNA is designated SEQ ID:58, and is provided hereinbelow with reference to the sequence listing part. Nucleotide sequence SEQ ID:58 is located at position 14074 relative to the genome of Vaccinia virus.

[0966] VGAM72 precursor RNA, herein designated VGAM PRECURSOR RNA, folds onto itself, forming VGAM72 folded precursor RNA, herein designated VGAM FOLDED PRECURSOR RNA, which has a two-dimensional hairpin structure. As is well known in the art, this hairpin structure, is typical of RNA encoded by miRNA genes, and is due to the fact that the nucleotide sequence of the first half of the RNA encoded by a miRNA gene is an accurate or partial inversed-reversed sequence of the nucleotide sequence of the second half thereof.

[0967] An enzyme complex designated DICER COMPLEX, dices the VGAM72 folded precursor RNA, herein designated VGAM FOLDED PRECURSOR RNA, into VGAM72 RNA, herein designated VGAM RNA, a single stranded ˜22 nt long RNA segment. As is known in the art, dicing of a hairpin structured RNA precursor product into a short ˜22 nt RNA segment is catalyzed by an enzyme complex comprising an enzyme called Dicer together with other necessary proteins. A probable (over 70%) nucleotide sequence of VGAM72 RNA is designated SEQ ID:407, and is provided hereinbelow with reference to the sequence listing part.

[0968] VGAM72 host target gene, herein designated VGAM HOST TARGET GENE, encodes a corresponding messenger RNA, VGAM72 host target RNA, herein designated VGAM HOST TARGET RNA. VGAM72 host target RNA, herein designated VGAM HOST TARGET RNA, comprises three regions, as is typical of mRNA of a protein coding gene: a 5 untranslated region, a protein coding region and a 3 untranslated region, designated 5UTR, PROTEIN CODING and 3UTR respectively.

[0969] VGAM72 RNA, herein designated VGAM RNA, binds complementarily to one or more host target binding sites located in untranslated regions of VGAM72 host target RNA, herein designated VGAM HOST TARGET RNA. This complementary binding is due to the fact that the nucleotide sequence of VGAM72 RNA, herein designated VGAM RNA, is an accurate or a partial inversed-reversed sequence of the nucleotide sequence of each of the host target binding sites. As an illustration, FIG. 1 shows 3 such host target binding sites, designated BINDING SITE I, BINDING SITE II and BINDING SITE III respectively. It is appreciated that the number of host target binding sites shown in FIG. 1 is meant as an illustration only, and is not meant to be limiting VGAM72 RNA, herein designated VGAM RNA, may have a different number of host target binding sites in untranslated regions of a VGAM72 host target RNA, herein designated VGAM HOST TARGET RNA. It is further appreciated that while FIG. 1 depicts host target binding sites in the 3UTR region, this is meant as an example only these host target binding sites may be located in the 3UTR region, the 5UTR region, or in both 3UTR and 5UTR regions.

[0970] The complementary binding of VGAM72 RNA, herein designated VGAM RNA, to host target binding sites on VGAM72 host target RNA, herein designated VGAM HOST TARGET RNA, such as BINDING SITE I, BINDING SITE II and BINDING SITE III, inhibits translation of VGAM72 host target RNA, herein designated VGAM HOST TARGET RNA, into VGAM72 host target protein, herein designated VGAM HOST TARGET PROTEIN. VGAM host target protein is therefore outlined by a broken line.

[0971] It is appreciated that VGAM72 host target gene, herein designated VGAM HOST TARGET GENE, in fact represents a plurality of VGAM72 host target genes. The mRNA of each one of this plurality of VGAM72 host target genes comprises one or more host target binding sites, each having a nucleotide sequence which is at least partly complementary to VGAM72 RNA, herein designated VGAM RNA, and which when bound by VGAM72 RNA, herein designated VGAM RNA, causes inhibition of translation of respective one or more VGAM72 host target proteins.

[0972] It is further appreciated by one skilled in the art that the mode of translational inhibition illustrated by FIG. 1 with specific reference to translational inhibition exerted by VGAM72 gene, herein designated VGAM GENE, on one or more VGAM72 host target gene, herein designated VGAM HOST TARGET GENE, is in fact common to other known non-viral miRNA genes. As mentioned hereinabove with reference to the background section, although a specific complementary binding site has been demonstrated only for some of the known miRNA genes (primarily Lin-4 and Let-7), all other recently discovered miRNA genes are also believed by those skilled in the art to modulate expression of other genes by complementary binding, although specific complementary binding sites of these other miRNA genes have not yet been found (Ruvkun G., Perspective: Glimpses of a tiny RNA world, Science 294, 779 (2001)).

[0973] It is yet further appreciated that a function of VGAM72 is inhibition of expression of host target genes, as part of a novel viral mechanism of attacking a host. Accordingly, utilities of VGAM72 include diagnosis, prevention and treatment of viral infection by Vaccinia virus. Specific functions, and accordingly utilities, of VGAM72 correlate with, and may be deduced from, the identity of the host target genes which VGAM72 binds and inhibits, and the function of these host target genes, as elaborated hereinbelow.

[0974] Nucleotide sequences of the VGAM72 precursor RNA, herein designated VGAM PRECURSOR RNA, and of the diced VGAM72 RNA, herein designated VGAM RNA, and a schematic representation of the secondary folding of VGAM72 folded precursor RNA, herein designated VGAM FOLDED PRECURSOR RNA, of VGAM72 are further described hereinbelow with reference to Table 1.

[0975] Nucleotide sequences of host target binding sites, such as BINDING SITE-I, BINDING SITE-II and BINDING SITE-III of FIG. 1, found on, and schematic representation of the complementarity of each of these host target binding sites to VGAM72 RNA, herein designated VGAM RNA, are described hereinbelow with reference to Table 2.

[0976] FIG. 1 further provides a conceptual description of another novel bioinformatically detected viral gene of the present invention, referred to here as Viral Genomic Address Messenger 73 (VGAM73) viral gene, which modulates expression of respective host target genes thereof, the function and utility of which host target genes is known in the art.

[0977] VGAM73 is a novel bioinformatically detected regulatory, non protein coding, viral micro RNA (miRNA) gene. The method by which VGAM73 was detected is described hereinabove with reference to FIGS. 2-8.

[0978] VGAM73 gene, herein designated VGAM GENE, is a viral gene contained in the genome of Vaccinia virus. VGAM73 host target gene, herein designated VGAM HOST TARGET GENE, is a human gene contained in the human genome.

[0979] VGAM73 gene, herein designated VGAM GENE, encodes a VGAM73 precursor RNA, herein designated VGAM PRECURSOR RNA. Similar to other miRNA genes, and unlike most ordinary genes, VGAM73 precursor RNA, herein designated VGAM PRECURSOR RNA, does not encode a protein. A nucleotide sequence identical or highly similar to the nucleotide sequence of VGAM73 precursor RNA is designated SEQ ID:59, and is provided hereinbelow with reference to the sequence listing part. Nucleotide sequence SEQ ID:59 is located at position 14338 relative to the genome of Vaccinia virus.

[0980] VGAM73 precursor RNA, herein designated VGAM PRECURSOR RNA, folds onto itself, forming VGAM73 folded precursor RNA, herein designated VGAM FOLDED PRECURSOR RNA, which has a two-dimensional hairpin structure. As is well known in the art, this hairpin structure, is typical of RNA encoded by miRNA genes, and is due to the fact that the nucleotide sequence of the first half of the RNA encoded by a miRNA gene is an accurate or partial inversed-reversed sequence of the nucleotide sequence of the second half thereof.

[0981] An enzyme complex designated DICER COMPLEX, dices the VGAM73 folded precursor RNA, herein designated VGAM FOLDED PRECURSOR RNA, into VGAM73 RNA, herein designated VGAM RNA, a single stranded ˜22 nt long RNA segment. As is known in the art, dicing of a hairpin structured RNA precursor product into a short ˜22 nt RNA segment is catalyzed by an enzyme complex comprising an enzyme called Dicer together with other necessary proteins. A probable (over 83%) nucleotide sequence of VGAM73 RNA is designated SEQ ID:408, and is provided hereinbelow with reference to the sequence listing part.

[0982] VGAM73 host target gene, herein designated VGAM HOST TARGET GENE, encodes a corresponding messenger RNA, VGAM73 host target RNA, herein designated VGAM HOST TARGET RNA. VGAM73 host target RNA, herein designated VGAM HOST TARGET RNA, comprises three regions, as is typical of mRNA of a protein coding gene: a 5 untranslated region, a protein coding region and a 3 untranslated region, designated 5UTR, PROTEIN CODING and 3UTR respectively.

[0983] VGAM73 RNA, herein designated VGAM RNA, binds complementarily to one or more host target binding sites located in untranslated regions of VGAM73 host target RNA, herein designated VGAM HOST TARGET RNA. This complementary binding is due to the fact that the nucleotide sequence of VGAM73 RNA, herein designated VGAM RNA, is an accurate or a partial inversed-reversed sequence of the nucleotide sequence of each of the host target binding sites. As an illustration, FIG. 1 shows 3 such host target binding sites, designated BINDING SITE I, BINDING SITE II and BINDING SITE III respectively. It is appreciated that the number of host target binding sites shown in FIG. 1 is meant as an illustration only, and is not meant to be limiting VGAM73 RNA, herein designated VGAM RNA, may have a different number of host target binding sites in untranslated regions of a VGAM73 host target RNA, herein designated VGAM HOST TARGET RNA. It is further appreciated that while FIG. 1 depicts host target binding sites in the 3UTR region, this is meant as an example only these host target binding sites may be located in the 3UTR region, the 5UTR region, or in both 3UTR and 5UTR regions.

[0984] The complementary binding of VGAM73 RNA, herein designated VGAM RNA, to host target binding sites on VGAM73 host target RNA, herein designated VGAM HOST TARGET RNA, such as BINDING SITE I, BINDING SITE II and BINDING SITE III, inhibits translation of VGAM73 host target RNA, herein designated VGAM HOST TARGET RNA, into VGAM73 host target protein, herein designated VGAM HOST TARGET PROTEIN. VGAM host target protein is therefore outlined by a broken line.

[0985] It is appreciated that VGAM73 host target gene, herein designated VGAM HOST TARGET GENE, in fact represents a plurality of VGAM73 host target genes. The mRNA of each one of this plurality of VGAM73 host target genes comprises one or more host target binding sites, each having a nucleotide sequence which is at least partly complementary to VGAM73 RNA, herein designated VGAM RNA, and which when bound by VGAM73 RNA, herein designated VGAM RNA, causes inhibition of translation of respective one or more VGAM73 host target proteins.

[0986] It is further appreciated by one skilled in the art that the mode of translational inhibition illustrated by FIG. 1 with specific reference to translational inhibition exerted by VGAM73 gene, herein designated VGAM GENE, on one or more VGAM73 host target gene, herein designated VGAM HOST TARGET GENE, is in fact common to other known non-viral miRNA genes. As mentioned hereinabove with reference to the background section, although a specific complementary binding site has been demonstrated only for some of the known miRNA genes (primarily Lin-4 and Let-7), all other recently discovered miRNA genes are also believed by those skilled in the art to modulate expression of other genes by complementary binding, although specific complementary binding sites of these other miRNA genes have not yet been found (Ruvkun G., Perspective: Glimpses of a tiny RNA world, Science 294, 779 (2001)).

[0987] It is yet further appreciated that a function of VGAM73 is inhibition of expression of host target genes, as part of a novel viral mechanism of attacking a host. Accordingly, utilities of VGAM73 include diagnosis, prevention and treatment of viral infection by Vaccinia virus. Specific functions, and accordingly utilities, of VGAM73 correlate with, and may be deduced from, the identity of the host target genes which VGAM73 binds and inhibits, and the function of these host target genes, as elaborated hereinbelow.

[0988] Nucleotide sequences of the VGAM73 precursor RNA, herein designated VGAM PRECURSOR RNA, and of the diced VGAM73 RNA, herein designated VGAM RNA, and a schematic representation of the secondary folding of VGAM73 folded precursor RNA, herein designated VGAM FOLDED PRECURSOR RNA, of VGAM73 are further described hereinbelow with reference to Table 1.

[0989] Nucleotide sequences of host target binding sites, such as BINDING SITE-I, BINDING SITE-II and BINDING SITE-III of FIG. 1, found on, and schematic representation of the complementarity of each of these host target binding sites to VGAM73 RNA, herein designated VGAM RNA, are described hereinbelow with reference to Table 2.

[0990] FIG. 1 further provides a conceptual description of another novel bioinformatically detected viral gene of the present invention, referred to here as Viral Genomic Address Messenger 74 (VGAM74) viral gene, which modulates expression of respective host target genes thereof, the function and utility of which host target genes is known in the art.

[0991] VGAM74 is a novel bioinformatically detected regulatory, non protein coding, viral micro RNA (miRNA) gene. The method by which VGAM74 was detected is described hereinabove with reference to FIGS. 2-8.

[0992] VGAM74 gene, herein designated VGAM GENE, is a viral gene contained in the genome of Vaccinia virus. VGAM74 host target gene, herein designated VGAM HOST TARGET GENE, is a human gene contained in the human genome.

[0993] VGAM74 gene, herein designated VGAM GENE, encodes a VGAM74 precursor RNA, herein designated VGAM PRECURSOR RNA. Similar to other miRNA genes, and unlike most ordinary genes, VGAM74 precursor RNA, herein designated VGAM PRECURSOR RNA, does not encode a protein. A nucleotide sequence identical or highly similar to the nucleotide sequence of VGAM74 precursor RNA is designated SEQ ID:60, and is provided hereinbelow with reference to the sequence listing part. Nucleotide sequence SEQ ID:60 is located at position 15206 relative to the genome of Vaccinia virus.

[0994] VGAM74 precursor RNA, herein designated VGAM PRECURSOR RNA, folds onto itself, forming VGAM74 folded precursor RNA, herein designated VGAM FOLDED PRECURSOR RNA, which has a two-dimensional hairpin structure. As is well known in the art, this hairpin structure, is typical of RNA encoded by miRNA genes, and is due to the fact that the nucleotide sequence of the first half of the RNA encoded by a miRNA gene is an accurate or partial inversed-reversed sequence of the nucleotide sequence of the second half thereof.

[0995] An enzyme complex designated DICER COMPLEX, dices the VGAM74 folded precursor RNA, herein designated VGAM FOLDED PRECURSOR RNA, into VGAM74 RNA, herein designated VGAM RNA, a single stranded ˜22 nt long RNA segment. As is known in the art, dicing of a hairpin structured RNA precursor product into a short ˜22 nt RNA segment is catalyzed by an enzyme complex comprising an enzyme called Dicer together with other necessary proteins. A probable (over 87%) nucleotide sequence of VGAM74 RNA is designated SEQ ID:409, and is provided hereinbelow with reference to the sequence listing part.

[0996] VGAM74 host target gene, herein designated VGAM HOST TARGET GENE, encodes a corresponding messenger RNA, VGAM74 host target RNA, herein designated VGAM HOST TARGET RNA. VGAM74 host target RNA, herein designated VGAM HOST TARGET RNA, comprises three regions, as is typical of mRNA of a protein coding gene: a 5 untranslated region, a protein coding region and a 3 untranslated region, designated 5UTR, PROTEIN CODING and 3UTR respectively.

[0997] VGAM74 RNA, herein designated VGAM RNA, binds complementarily to one or more host target binding sites located in untranslated regions of VGAM74 host target RNA, herein designated VGAM HOST TARGET RNA. This complementary binding is due to the fact that the nucleotide sequence of VGAM74 RNA, herein designated VGAM RNA, is an accurate or a partial inversed-reversed sequence of the nucleotide sequence of each of the host target binding sites. As an illustration, FIG. 1 shows 3 such host target binding sites, designated BINDING SITE I, BINDING SITE II and BINDING SITE III respectively. It is appreciated that the number of host target binding sites shown in FIG. 1 is meant as an illustration only, and is not meant to be limiting VGAM74 RNA, herein designated VGAM RNA, may have a different number of host target binding sites in untranslated regions of a VGAM74 host target RNA, herein designated VGAM HOST TARGET RNA. It is further appreciated that while FIG. 1 depicts host target binding sites in the 3UTR region, this is meant as an example only these host target binding sites may be located in the 3UTR region, the 5UTR region, or in both 3UTR and 5UTR regions.

[0998] The complementary binding of VGAM74 RNA, herein designated VGAM RNA, to host target binding sites on VGAM74 host target RNA, herein designated VGAM HOST TARGET RNA, such as BINDING SITE I, BINDING SITE II and BINDING SITE III, inhibits translation of VGAM74 host target RNA, herein designated VGAM HOST TARGET RNA, into VGAM74 host target protein, herein designated VGAM HOST TARGET PROTEIN. VGAM host target protein is therefore outlined by a broken line.

[0999] It is appreciated that VGAM74 host target gene, herein designated VGAM HOST TARGET GENE, in fact represents a plurality of VGAM74 host target genes. The mRNA of each one of this plurality of VGAM74 host target genes comprises one or more host target binding sites, each having a nucleotide sequence which is at least partly complementary to VGAM74 RNA, herein designated VGAM RNA, and which when bound by VGAM74 RNA, herein designated VGAM RNA, causes inhibition of translation of respective one or more VGAM74 host target proteins.

[1000] It is further appreciated by one skilled in the art that the mode of translational inhibition illustrated by FIG. 1 with specific reference to translational inhibition exerted by VGAM74 gene, herein designated VGAM GENE, on one or more VGAM74 host target gene, herein designated VGAM HOST TARGET GENE, is in fact common to other known non-viral miRNA genes. As mentioned hereinabove with reference to the background section, although a specific complementary binding site has been demonstrated only for some of the known miRNA genes (primarily Lin-4 and Let-7), all other recently discovered miRNA genes are also believed by those skilled in the art to modulate expression of other genes by complementary binding, although specific complementary binding sites of these other miRNA genes have not yet been found (Ruvkun G., Perspective: Glimpses of a tiny RNA world, Science 294, 779 (2001)).

[1001] It is yet further appreciated that a function of VGAM74 is inhibition of expression of host target genes, as part of a novel viral mechanism of attacking a host. Accordingly, utilities of VGAM74 include diagnosis, prevention and treatment of viral infection by Vaccinia virus. Specific functions, and accordingly utilities, of VGAM74 correlate with, and may be deduced from, the identity of the host target genes which VGAM74 binds and inhibits, and the function of these host target genes, as elaborated hereinbelow.

[1002] Nucleotide sequences of the VGAM74 precursor RNA, herein designated VGAM PRECURSOR RNA, and of the diced VGAM74 RNA, herein designated VGAM RNA, and a schematic representation of the secondary folding of VGAM74 folded precursor RNA, herein designated VGAM FOLDED PRECURSOR RNA, of VGAM74 are further described hereinbelow with reference to Table 1.

[1003] Nucleotide sequences of host target binding sites, such as BINDING SITE-I, BINDING SITE-II and BINDING SITE-III of FIG. 1, found on, and schematic representation of the complementarity of each of these host target binding sites to VGAM74 RNA, herein designated VGAM RNA, are described hereinbelow with reference to Table 2.

[1004] FIG. 1 further provides a conceptual description of another novel bioinformatically detected viral gene of the present invention, referred to here as Viral Genomic Address Messenger 75 (VGAM75) viral gene, which modulates expression of respective host target genes thereof, the function and utility of which host target genes is known in the art.

[1005] VGAM75 is a novel bioinformatically detected regulatory, non protein coding, viral micro RNA (miRNA) gene. The method by which VGAM75 was detected is described hereinabove with reference to FIGS. 2-8.

[1006] VGAM75 gene, herein designated VGAM GENE, is a viral gene contained in the genome of Vaccinia virus. VGAM75 host target gene, herein designated VGAM HOST TARGET GENE, is a human gene contained in the human genome.

[1007] VGAM75 gene, herein designated VGAM GENE, encodes a VGAM75 precursor RNA, herein designated VGAM PRECURSOR RNA. Similar to other miRNA genes, and unlike most ordinary genes, VGAM75 precursor RNA, herein designated VGAM PRECURSOR RNA, does not encode a protein. A nucleotide sequence identical or highly similar to the nucleotide sequence of VGAM75 precursor RNA is designated SEQ ID:61, and is provided hereinbelow with reference to the sequence listing part. Nucleotide sequence SEQ ID:61 is located at position 14680 relative to the genome of Vaccinia virus.

[1008] VGAM75 precursor RNA, herein designated VGAM PRECURSOR RNA, folds onto itself, forming VGAM75 folded precursor RNA, herein designated VGAM FOLDED PRECURSOR RNA, which has a two-dimensional hairpin structure. As is well known in the art, this hairpin structure, is typical of RNA encoded by miRNA genes, and is due to the fact that the nucleotide sequence of the first half of the RNA encoded by a miRNA gene is an accurate or partial inversed-reversed sequence of the nucleotide sequence of the second half thereof.

[1009] An enzyme complex designated DICER COMPLEX, dices the VGAM75 folded precursor RNA, herein designated VGAM FOLDED PRECURSOR RNA, into VGAM75 RNA, herein designated VGAM RNA, a single stranded ˜22 nt long RNA segment. As is known in the art, dicing of a hairpin structured RNA precursor product into a short ˜22 nt RNA segment is catalyzed by an enzyme complex comprising an enzyme called Dicer together with other necessary proteins. A probable (over 89%) nucleotide sequence of VGAM75 RNA is designated SEQ ID:410, and is provided hereinbelow with reference to the sequence listing part.

[1010] VGAM75 host target gene, herein designated VGAM HOST TARGET GENE, encodes a corresponding messenger RNA, VGAM75 host target RNA, herein designated VGAM HOST TARGET RNA. VGAM75 host target RNA, herein designated VGAM HOST TARGET RNA, comprises three regions, as is typical of mRNA of a protein coding gene: a 5 untranslated region, a protein coding region and a 3 untranslated region, designated 5UTR, PROTEIN CODING and 3UTR respectively.

[1011] VGAM75 RNA, herein designated VGAM RNA, binds complementarily to one or more host target binding sites located in untranslated regions of VGAM75 host target RNA, herein designated VGAM HOST TARGET RNA. This complementary binding is due to the fact that the nucleotide sequence of VGAM75 RNA, herein designated VGAM RNA, is an accurate or a partial inversed-reversed sequence of the nucleotide sequence of each of the host target binding sites. As an illustration, FIG. 1 shows 3 such host target binding sites, designated BINDING SITE I, BINDING SITE II and BINDING SITE III respectively. It is appreciated that the number of host target binding sites shown in FIG. 1 is meant as an illustration only, and is not meant to be limiting VGAM75 RNA, herein designated VGAM RNA, may have a different number of host target binding sites in untranslated regions of a VGAM75 host target RNA, herein designated VGAM HOST TARGET RNA. It is further appreciated that while FIG. 1 depicts host target binding sites in the 3UTR region, this is meant as an example only these host target binding sites may be located in the 3UTR region, the 5UTR region, or in both 3UTR and 5UTR regions.

[1012] The complementary binding of VGAM75 RNA, herein designated VGAM RNA, to host target binding sites on VGAM75 host target RNA, herein designated VGAM HOST TARGET RNA, such as BINDING SITE I, BINDING SITE II and BINDING SITE III, inhibits translation of VGAM75 host target RNA, herein designated VGAM HOST TARGET RNA, into VGAM75 host target protein, herein designated VGAM HOST TARGET PROTEIN. VGAM host target protein is therefore outlined by a broken line.

[1013] It is appreciated that VGAM75 host target gene, herein designated VGAM HOST TARGET GENE, in fact represents a plurality of VGAM75 host target genes. The mRNA of each one of this plurality of VGAM75 host target genes comprises one or more host target binding sites, each having a nucleotide sequence which is at least partly complementary to VGAM75 RNA, herein designated VGAM RNA, and which when bound by VGAM75 RNA, herein designated VGAM RNA, causes inhibition of translation of respective one or more VGAM75 host target proteins.

[1014] It is further appreciated by one skilled in the art that the mode of translational inhibition illustrated by FIG. 1 with specific reference to translational inhibition exerted by VGAM75 gene, herein designated VGAM GENE, on one or more VGAM75 host target gene, herein designated VGAM HOST TARGET GENE, is in fact common to other known non-viral miRNA genes. As mentioned hereinabove with reference to the background section, although a specific complementary binding site has been demonstrated only for some of the known miRNA genes (primarily Lin-4 and Let-7), all other recently discovered miRNA genes are also believed by those skilled in the art to modulate expression of other genes by complementary binding, although specific complementary binding sites of these other miRNA genes have not yet been found (Ruvkun G., Perspective: Glimpses of a tiny RNA world, Science 294, 779 (2001)).

[1015] It is yet further appreciated that a function of VGAM75 is inhibition of expression of host target genes, as part of a novel viral mechanism of attacking a host. Accordingly, utilities of VGAM75 include diagnosis, prevention and treatment of viral infection by Vaccinia virus. Specific functions, and accordingly utilities, of VGAM75 correlate with, and may be deduced from, the identity of the host target genes which VGAM75 binds and inhibits, and the function of these host target genes, as elaborated hereinbelow.

[1016] Nucleotide sequences of the VGAM75 precursor RNA, herein designated VGAM PRECURSOR RNA, and of the diced VGAM75 RNA, herein designated VGAM RNA, and a schematic representation of the secondary folding of VGAM75 folded precursor RNA, herein designated VGAM FOLDED PRECURSOR RNA, of VGAM75 are further described hereinbelow with reference to Table 1.

[1017] Nucleotide sequences of host target binding sites, such as BINDING SITE-I, BINDING SITE-II and BINDING SITE-III of FIG. 1, found on, and schematic representation of the complementarity of each of these host target binding sites to VGAM75 RNA, herein designated VGAM RNA, are described hereinbelow with reference to Table 2.

[1018] FIG. 1 further provides a conceptual description of another novel bioinformatically detected viral gene of the present invention, referred to here as Viral Genomic Address Messenger 76 (VGAM76) viral gene, which modulates expression of respective host target genes thereof, the function and utility of which host target genes is known in the art.

[1019] VGAM76 is a novel bioinformatically detected regulatory, non protein coding, viral micro RNA (miRNA) gene. The method by which VGAM76 was detected is described hereinabove with reference to FIGS. 2-8.

[1020] VGAM76 gene, herein designated VGAM GENE, is a viral gene contained in the genome of Vaccinia virus. VGAM76 host target gene, herein designated VGAM HOST TARGET GENE, is a human gene contained in the human genome.

[1021] VGAM76 gene, herein designated VGAM GENE, encodes a VGAM76 precursor RNA, herein designated VGAM PRECURSOR RNA. Similar to other miRNA genes, and unlike most ordinary genes, VGAM76 precursor RNA, herein designated VGAM PRECURSOR RNA, does not encode a protein. A nucleotide sequence identical or highly similar to the nucleotide sequence of VGAM76 precursor RNA is designated SEQ ID:62, and is provided hereinbelow with reference to the sequence listing part. Nucleotide sequence SEQ ID:62 is located at position 15884 relative to the genome of Vaccinia virus.

[1022] VGAM76 precursor RNA, herein designated VGAM PRECURSOR RNA, folds onto itself, forming VGAM76 folded precursor RNA, herein designated VGAM FOLDED PRECURSOR RNA, which has a two-dimensional hairpin structure. As is well known in the art, this hairpin structure, is typical of RNA encoded by miRNA genes, and is due to the fact that the nucleotide sequence of the first half of the RNA encoded by a miRNA gene is an accurate or partial inversed-reversed sequence of the nucleotide sequence of the second half thereof.

[1023] An enzyme complex designated DICER COMPLEX, dices the VGAM76 folded precursor RNA, herein designated VGAM FOLDED PRECURSOR RNA, into VGAM76 RNA, herein designated VGAM RNA, a single stranded ˜22 nt long RNA segment. As is known in the art, dicing of a hairpin structured RNA precursor product into a short ˜22 nt RNA segment is catalyzed by an enzyme complex comprising an enzyme called Dicer together with other necessary proteins. A probable (over 75%) nucleotide sequence of VGAM76 RNA is designated SEQ ID:411, and is provided hereinbelow with reference to the sequence listing part.

[1024] VGAM76 host target gene, herein designated VGAM HOST TARGET GENE, encodes a corresponding messenger RNA, VGAM76 host target RNA, herein designated VGAM HOST TARGET RNA. VGAM76 host target RNA, herein designated VGAM HOST TARGET RNA, comprises three regions, as is typical of mRNA of a protein coding gene: a 5 untranslated region, a protein coding region and a 3 untranslated region, designated 5UTR, PROTEIN CODING and 3UTR respectively.

[1025] VGAM76 RNA, herein designated VGAM RNA, binds complementarily to one or more host target binding sites located in untranslated regions of VGAM76 host target RNA, herein designated VGAM HOST TARGET RNA. This complementary binding is due to the fact that the nucleotide sequence of VGAM76 RNA, herein designated VGAM RNA, is an accurate or a partial inversed-reversed sequence of the nucleotide sequence of each of the host target binding sites. As an illustration, FIG. 1 shows 3 such host target binding sites, designated BINDING SITE I, BINDING SITE II and BINDING SITE III respectively. It is appreciated that the number of host target binding sites shown in FIG. 1 is meant as an illustration only, and is not meant to be limiting VGAM76 RNA, herein designated VGAM RNA, may have a different number of host target binding sites in untranslated regions of a VGAM76 host target RNA, herein designated VGAM HOST TARGET RNA. It is further appreciated that while FIG. 1 depicts host target binding sites in the 3UTR region, this is meant as an example only these host target binding sites may be located in the 3UTR region, the 5UTR region, or in both 3UTR and 5UTR regions.

[1026] The complementary binding of VGAM76 RNA, herein designated VGAM RNA, to host target binding sites on VGAM76 host target RNA, herein designated VGAM HOST TARGET RNA, such as BINDING SITE I, BINDING SITE II and BINDING SITE III, inhibits translation of VGAM76 host target RNA, herein designated VGAM HOST TARGET RNA, into VGAM76 host target protein, herein designated VGAM HOST TARGET PROTEIN. VGAM host target protein is therefore outlined by a broken line.

[1027] It is appreciated that VGAM76 host target gene, herein designated VGAM HOST TARGET GENE, in fact represents a plurality of VGAM76 host target genes. The mRNA of each one of this plurality of VGAM76 host target genes comprises one or more host target binding sites, each having a nucleotide sequence which is at least partly complementary to VGAM76 RNA, herein designated VGAM RNA, and which when bound by VGAM76 RNA, herein designated VGAM RNA, causes inhibition of translation of respective one or more VGAM76 host target proteins.

[1028] It is further appreciated by one skilled in the art that the mode of translational inhibition illustrated by FIG. 1 with specific reference to translational inhibition exerted by VGAM76 gene, herein designated VGAM GENE, on one or more VGAM76 host target gene, herein designated VGAM HOST TARGET GENE, is in fact common to other known non-viral miRNA genes. As mentioned hereinabove with reference to the background section, although a specific complementary binding site has been demonstrated only for some of the known miRNA genes (primarily Lin-4 and Let-7), all other recently discovered miRNA genes are also believed by those skilled in the art to modulate expression of other genes by complementary binding, although specific complementary binding sites of these other miRNA genes have not yet been found (Ruvkun G., Perspective: Glimpses of a tiny RNA world, Science 294, 779 (2001)).

[1029] It is yet further appreciated that a function of VGAM76 is inhibition of expression of host target genes, as part of a novel viral mechanism of attacking a host. Accordingly, utilities of VGAM76 include diagnosis, prevention and treatment of viral infection by Vaccinia virus. Specific functions, and accordingly utilities, of VGAM76 correlate with, and may be deduced from, the identity of the host target genes which VGAM76 binds and inhibits, and the function of these host target genes, as elaborated hereinbelow.

[1030] Nucleotide sequences of the VGAM76 precursor RNA, herein designated VGAM PRECURSOR RNA, and of the diced VGAM76 RNA, herein designated VGAM RNA, and a schematic representation of the secondary folding of VGAM76 folded precursor RNA, herein designated VGAM FOLDED PRECURSOR RNA, of VGAM76 are further described hereinbelow with reference to Table 1.

[1031] Nucleotide sequences of host target binding sites, such as BINDING SITE-I, BINDING SITE-II and BINDING SITE-III of FIG. 1, found on, and schematic representation of the complementarity of each of these host target binding sites to VGAM76 RNA, herein designated VGAM RNA, are described hereinbelow with reference to Table 2.

[1032] FIG. 1 further provides a conceptual description of another novel bioinformatically detected viral gene of the present invention, referred to here as Viral Genomic Address Messenger 77 (VGAM77) viral gene, which modulates expression of respective host target genes thereof, the function and utility of which host target genes is known in the art.

[1033] VGAM77 is a novel bioinformatically detected regulatory, non protein coding, viral micro RNA (miRNA) gene. The method by which VGAM77 was detected is described hereinabove with reference to FIGS. 2-8.

[1034] VGAM77 gene, herein designated VGAM GENE, is a viral gene contained in the genome of Vaccinia virus. VGAM77 host target gene, herein designated VGAM HOST TARGET GENE, is a human gene contained in the human genome.

[1035] VGAM77 gene, herein designated VGAM GENE, encodes a VGAM77 precursor RNA, herein designated VGAM PRECURSOR RNA. Similar to other miRNA genes, and unlike most ordinary genes, VGAM77 precursor RNA, herein designated VGAM PRECURSOR RNA, does not encode a protein. A nucleotide sequence identical or highly similar to the nucleotide sequence of VGAM77 precursor RNA is designated SEQ ID:63, and is provided hereinbelow with reference to the sequence listing part. Nucleotide sequence SEQ ID:63 is located at position 17339 relative to the genome of Vaccinia virus.

[1036] VGAM77 precursor RNA, herein designated VGAM PRECURSOR RNA, folds onto itself, forming VGAM77 folded precursor RNA, herein designated VGAM FOLDED PRECURSOR RNA, which has a two-dimensional hairpin structure. As is well known in the art, this hairpin structure, is typical of RNA encoded by miRNA genes, and is due to the fact that the nucleotide sequence of the first half of the RNA encoded by a miRNA gene is an accurate or partial inversed-reversed sequence of the nucleotide sequence of the second half thereof.

[1037] An enzyme complex designated DICER COMPLEX, dices the VGAM77 folded precursor RNA, herein designated VGAM FOLDED PRECURSOR RNA, into VGAM77 RNA, herein designated VGAM RNA, a single stranded ˜22 nt long RNA segment. As is known in the art, dicing of a hairpin structured RNA precursor product into a short ˜22 nt RNA segment is catalyzed by an enzyme complex comprising an enzyme called Dicer together with other necessary proteins. A probable (over 77%) nucleotide sequence of VGAM77 RNA is designated SEQ ID:412, and is provided hereinbelow with reference to the sequence listing part.

[1038] VGAM77 host target gene, herein designated VGAM HOST TARGET GENE, encodes a corresponding messenger RNA, VGAM77 host target RNA, herein designated VGAM HOST TARGET RNA. VGAM77 host target RNA, herein designated VGAM HOST TARGET RNA, comprises three regions, as is typical of mRNA of a protein coding gene: a 5 untranslated region, a protein coding region and a 3 untranslated region, designated 5UTR, PROTEIN CODING and 3UTR respectively.

[1039] VGAM77 RNA, herein designated VGAM RNA, binds complementarily to one or more host target binding sites located in untranslated regions of VGAM77 host target RNA, herein designated VGAM HOST TARGET RNA. This complementary binding is due to the fact that the nucleotide sequence of VGAM77 RNA, herein designated VGAM RNA, is an accurate or a partial inversed-reversed sequence of the nucleotide sequence of each of the host target binding sites. As an illustration, FIG. 1 shows 3 such host target binding sites, designated BINDING SITE I, BINDING SITE II and BINDING SITE III respectively. It is appreciated that the number of host target binding sites shown in FIG. 1 is meant as an illustration only, and is not meant to be limiting VGAM77 RNA, herein designated VGAM RNA, may have a different number of host target binding sites in untranslated regions of a VGAM77 host target RNA, herein designated VGAM HOST TARGET RNA. It is further appreciated that while FIG. 1 depicts host target binding sites in the 3UTR region, this is meant as an example only these host target binding sites may be located in the 3UTR region, the 5UTR region, or in both 3UTR and 5UTR regions.

[1040] The complementary binding of VGAM77 RNA, herein designated VGAM RNA, to host target binding sites on VGAM77 host target RNA, herein designated VGAM HOST TARGET RNA, such as BINDING SITE I, BINDING SITE II and BINDING SITE III, inhibits translation of VGAM77 host target RNA, herein designated VGAM HOST TARGET RNA, into VGAM77 host target protein, herein designated VGAM HOST TARGET PROTEIN. VGAM host target protein is therefore outlined by a broken line.

[1041] It is appreciated that VGAM77 host target gene, herein designated VGAM HOST TARGET GENE, in fact represents a plurality of VGAM77 host target genes. The mRNA of each one of this plurality of VGAM77 host target genes comprises one or more host target binding sites, each having a nucleotide sequence which is at least partly complementary to VGAM77 RNA, herein designated VGAM RNA, and which when bound by VGAM77 RNA, herein designated VGAM RNA, causes inhibition of translation of respective one or more VGAM77 host target proteins.

[1042] It is further appreciated by one skilled in the art that the mode of translational inhibition illustrated by FIG. 1 with specific reference to translational inhibition exerted by VGAM77 gene, herein designated VGAM GENE, on one or more VGAM77 host target gene, herein designated VGAM HOST TARGET GENE, is in fact common to other known non-viral miRNA genes. As mentioned hereinabove with reference to the background section, although a specific complementary binding site has been demonstrated only for some of the known miRNA genes (primarily Lin-4 and Let-7), all other recently discovered miRNA genes are also believed by those skilled in the art to modulate expression of other genes by complementary binding, although specific complementary binding sites of these other miRNA genes have not yet been found (Ruvkun G., Perspective: Glimpses of a tiny RNA world, Science 294, 779 (2001)).

[1043] It is yet further appreciated that a function of VGAM77 is inhibition of expression of host target genes, as part of a novel viral mechanism of attacking a host. Accordingly, utilities of VGAM77 include diagnosis, prevention and treatment of viral infection by Vaccinia virus. Specific functions, and accordingly utilities, of VGAM77 correlate with, and may be deduced from, the identity of the host target genes which VGAM77 binds and inhibits, and the function of these host target genes, as elaborated hereinbelow.

[1044] Nucleotide sequences of the VGAM77 precursor RNA, herein designated VGAM PRECURSOR RNA, and of the diced VGAM77 RNA, herein designated VGAM RNA, and a schematic representation of the secondary folding of VGAM77 folded precursor RNA, herein designated VGAM FOLDED PRECURSOR RNA, of VGAM77 are further described hereinbelow with reference to Table 1.

[1045] Nucleotide sequences of host target binding sites, such as BINDING SITE-I, BINDING SITE-II and BINDING SITE-III of FIG. 1, found on, and schematic representation of the complementarity of each of these host target binding sites to VGAM77 RNA, herein designated VGAM RNA, are described hereinbelow with reference to Table 2.

[1046] FIG. 1 further provides a conceptual description of another novel bioinformatically detected viral gene of the present invention, referred to here as Viral Genomic Address Messenger 78 (VGAM78) viral gene, which modulates expression of respective host target genes thereof, the function and utility of which host target genes is known in the art.

[1047] VGAM78 is a novel bioinformatically detected regulatory, non protein coding, viral micro RNA (miRNA) gene. The method by which VGAM78 was detected is described hereinabove with reference to FIGS. 2-8.

[1048] VGAM78 gene, herein designated VGAM GENE, is a viral gene contained in the genome of Vaccinia virus. VGAM78 host target gene, herein designated VGAM HOST TARGET GENE, is a human gene contained in the human genome.

[1049] VGAM78 gene, herein designated VGAM GENE, encodes a VGAM78 precursor RNA, herein designated VGAM PRECURSOR RNA. Similar to other miRNA genes, and unlike most ordinary genes, VGAM78 precursor RNA, herein designated VGAM PRECURSOR RNA, does not encode a protein. A nucleotide sequence identical or highly similar to the nucleotide sequence of VGAM78 precursor RNA is designated SEQ ID:64, and is provided hereinbelow with reference to the sequence listing part. Nucleotide sequence SEQ ID:64 is located at position 17430 relative to the genome of Vaccinia virus.

[1050] VGAM78 precursor RNA, herein designated VGAM PRECURSOR RNA, folds onto itself, forming VGAM78 folded precursor RNA, herein designated VGAM FOLDED PRECURSOR RNA, which has a two-dimensional hairpin structure. As is well known in the art, this hairpin structure, is typical of RNA encoded by miRNA genes, and is due to the fact that the nucleotide sequence of the first half of the RNA encoded by a miRNA gene is an accurate or partial inversed-reversed sequence of the nucleotide sequence of the second half thereof.

[1051] An enzyme complex designated DICER COMPLEX, dices the VGAM78 folded precursor RNA, herein designated VGAM FOLDED PRECURSOR RNA, into VGAM78 RNA, herein designated VGAM RNA, a single stranded ˜22 nt long RNA segment. As is known in the art, dicing of a hairpin structured RNA precursor product into a short ˜22 nt RNA segment is catalyzed by an enzyme complex comprising an enzyme called Dicer together with other necessary proteins. A probable (over 88%) nucleotide sequence of VGAM78 RNA is designated SEQ ID:413, and is provided hereinbelow with reference to the sequence listing part.

[1052] VGAM78 host target gene, herein designated VGAM HOST TARGET GENE, encodes a corresponding messenger RNA, VGAM78 host target RNA, herein designated VGAM HOST TARGET RNA. VGAM78 host target RNA, herein designated VGAM HOST TARGET RNA, comprises three regions, as is typical of mRNA of a protein coding gene: a 5 untranslated region, a protein coding region and a 3 untranslated region, designated 5UTR, PROTEIN CODING and 3UTR respectively.

[1053] VGAM78 RNA, herein designated VGAM RNA, binds complementarily to one or more host target binding sites located in untranslated regions of VGAM78 host target RNA, herein designated VGAM HOST TARGET RNA. This complementary binding is due to the fact that the nucleotide sequence of VGAM78 RNA, herein designated VGAM RNA, is an accurate or a partial inversed-reversed sequence of the nucleotide sequence of each of the host target binding sites. As an illustration, FIG. 1 shows 3 such host target binding sites, designated BINDING SITE I, BINDING SITE II and BINDING SITE III respectively. It is appreciated that the number of host target binding sites shown in FIG. 1 is meant as an illustration only, and is not meant to be limiting VGAM78 RNA, herein designated VGAM RNA, may have a different number of host target binding sites in untranslated regions of a VGAM78 host target RNA, herein designated VGAM HOST TARGET RNA. It is further appreciated that while FIG. 1 depicts host target binding sites in the 3UTR region, this is meant as an example only these host target binding sites may be located in the 3UTR region, the 5UTR region, or in both 3UTR and 5UTR regions.

[1054] The complementary binding of VGAM78 RNA, herein designated VGAM RNA, to host target binding sites on VGAM78 host target RNA, herein designated VGAM HOST TARGET RNA, such as BINDING SITE I, BINDING SITE II and BINDING SITE III, inhibits translation of VGAM78 host target RNA, herein designated VGAM HOST TARGET RNA, into VGAM78 host target protein, herein designated VGAM HOST TARGET PROTEIN. VGAM host target protein is therefore outlined by a broken line.

[1055] It is appreciated that VGAM78 host target gene, herein designated VGAM HOST TARGET GENE, in fact represents a plurality of VGAM78 host target genes. The mRNA of each one of this plurality of VGAM78 host target genes comprises one or more host target binding sites, each having a nucleotide sequence which is at least partly complementary to VGAM78 RNA, herein designated VGAM RNA, and which when bound by VGAM78 RNA, herein designated VGAM RNA, causes inhibition of translation of respective one or more VGAM78 host target proteins.

[1056] It is further appreciated by one skilled in the art that the mode of translational inhibition illustrated by FIG. 1 with specific reference to translational inhibition exerted by VGAM78 gene, herein designated VGAM GENE, on one or more VGAM78 host target gene, herein designated VGAM HOST TARGET GENE, is in fact common to other known non-viral miRNA genes. As mentioned hereinabove with reference to the background section, although a specific complementary binding site has been demonstrated only for some of the known miRNA genes (primarily Lin-4 and Let-7), all other recently discovered miRNA genes are also believed by those skilled in the art to modulate expression of other genes by complementary binding, although specific complementary binding sites of these other miRNA genes have not yet been found (Ruvkun G., Perspective: Glimpses of a tiny RNA world, Science 294, 779 (2001)).

[1057] It is yet further appreciated that a function of VGAM78 is inhibition of expression of host target genes, as part of a novel viral mechanism of attacking a host. Accordingly, utilities of VGAM78 include diagnosis, prevention and treatment of viral infection by Vaccinia virus. Specific functions, and accordingly utilities, of VGAM78 correlate with, and may be deduced from, the identity of the host target genes which VGAM78 binds and inhibits, and the function of these host target genes, as elaborated hereinbelow.

[1058] Nucleotide sequences of the VGAM78 precursor RNA, herein designated VGAM PRECURSOR RNA, and of the diced VGAM78 RNA, herein designated VGAM RNA, and a schematic representation of the secondary folding of VGAM78 folded precursor RNA, herein designated VGAM FOLDED PRECURSOR RNA, of VGAM78 are further described hereinbelow with reference to Table 1.

[1059] Nucleotide sequences of host target binding sites, such as BINDING SITE-I, BINDING SITE-II and BINDING SITE-III of FIG. 1, found on, and schematic representation of the complementarity of each of these host target binding sites to VGAM78 RNA, herein designated VGAM RNA, are described hereinbelow with reference to Table 2.

[1060] FIG. 1 further provides a conceptual description of another novel bioinformatically detected viral gene of the present invention, referred to here as Viral Genomic Address Messenger 79 (VGAM79) viral gene, which modulates expression of respective host target genes thereof, the function and utility of which host target genes is known in the art.

[1061] VGAM79 is a novel bioinformatically detected regulatory, non protein coding, viral micro RNA (miRNA) gene. The method by which VGAM79 was detected is described hereinabove with reference to FIGS. 2-8.

[1062] VGAM79 gene, herein designated VGAM GENE, is a viral gene contained in the genome of Vaccinia virus. VGAM79 host target gene, herein designated VGAM HOST TARGET GENE, is a human gene contained in the human genome.

[1063] VGAM79 gene, herein designated VGAM GENE, encodes a VGAM79 precursor RNA, herein designated VGAM PRECURSOR RNA. Similar to other miRNA genes, and unlike most ordinary genes, VGAM79 precursor RNA, herein designated VGAM PRECURSOR RNA, does not encode a protein. A nucleotide sequence identical or highly similar to the nucleotide sequence of VGAM79 precursor RNA is designated SEQ ID:65, and is provided hereinbelow with reference to the sequence listing part. Nucleotide sequence SEQ ID:65 is located at position 17229 relative to the genome of Vaccinia virus.

[1064] VGAM79 precursor RNA, herein designated VGAM PRECURSOR RNA, folds onto itself, forming VGAM79 folded precursor RNA, herein designated VGAM FOLDED PRECURSOR RNA, which has a two-dimensional hairpin structure. As is well known in the art, this hairpin structure, is typical of RNA encoded by miRNA genes, and is due to the fact that the nucleotide sequence of the first half of the RNA encoded by a miRNA gene is an accurate or partial inversed-reversed sequence of the nucleotide sequence of the second half thereof.

[1065] An enzyme complex designated DICER COMPLEX, dices the VGAM79 folded precursor RNA, herein designated VGAM FOLDED PRECURSOR RNA, into VGAM79 RNA, herein designated VGAM RNA, a single stranded ˜22 nt long RNA segment. As is known in the art, dicing of a hairpin structured RNA precursor product into a short ˜22 nt RNA segment is catalyzed by an enzyme complex comprising an enzyme called Dicer together with other necessary proteins. A probable (over 89%) nucleotide sequence of VGAM79 RNA is designated SEQ ID:414, and is provided hereinbelow with reference to the sequence listing part.

[1066] VGAM79 host target gene, herein designated VGAM HOST TARGET GENE, encodes a corresponding messenger RNA, VGAM79 host target RNA, herein designated VGAM HOST TARGET RNA. VGAM79 host target RNA, herein designated VGAM HOST TARGET RNA, comprises three regions, as is typical of mRNA of a protein coding gene: a 5 untranslated region, a protein coding region and a 3 untranslated region, designated 5UTR, PROTEIN CODING and 3UTR respectively.

[1067] VGAM79 RNA, herein designated VGAM RNA, binds complementarily to one or more host target binding sites located in untranslated regions of VGAM79 host target RNA, herein designated VGAM HOST TARGET RNA. This complementary binding is due to the fact that the nucleotide sequence of VGAM79 RNA, herein designated VGAM RNA, is an accurate or a partial inversed-reversed sequence of the nucleotide sequence of each of the host target binding sites. As an illustration, FIG. 1 shows 3 such host target binding sites, designated BINDING SITE I, BINDING SITE II and BINDING SITE III respectively. It is appreciated that the number of host target binding sites shown in FIG. 1 is meant as an illustration only, and is not meant to be limiting VGAM79 RNA, herein designated VGAM RNA, may have a different number of host target binding sites in untranslated regions of a VGAM79 host target RNA, herein designated VGAM HOST TARGET RNA. It is further appreciated that while FIG. 1 depicts host target binding sites in the 3UTR region, this is meant as an example only these host target binding sites may be located in the 3UTR region, the 5UTR region, or in both 3UTR and 5UTR regions.

[1068] The complementary binding of VGAM79 RNA, herein designated VGAM RNA, to host target binding sites on VGAM79 host target RNA, herein designated VGAM HOST TARGET RNA, such as BINDING SITE I, BINDING SITE II and BINDING SITE III, inhibits translation of VGAM79 host target RNA, herein designated VGAM HOST TARGET RNA, into VGAM79 host target protein, herein designated VGAM HOST TARGET PROTEIN. VGAM host target protein is therefore outlined by a broken line.

[1069] It is appreciated that VGAM79 host target gene, herein designated VGAM HOST TARGET GENE, in fact represents a plurality of VGAM79 host target genes. The mRNA of each one of this plurality of VGAM79 host target genes comprises one or more host target binding sites, each having a nucleotide sequence which is at least partly complementary to VGAM79 RNA, herein designated VGAM RNA, and which when bound by VGAM79 RNA, herein designated VGAM RNA, causes inhibition of translation of respective one or more VGAM79 host target proteins.

[1070] It is further appreciated by one skilled in the art that the mode of translational inhibition illustrated by FIG. 1 with specific reference to translational inhibition exerted by VGAM79 gene, herein designated VGAM GENE, on one or more VGAM79 host target gene, herein designated VGAM HOST TARGET GENE, is in fact common to other known non-viral miRNA genes. As mentioned hereinabove with reference to the background section, although a specific complementary binding site has been demonstrated only for some of the known miRNA genes (primarily Lin-4 and Let-7), all other recently discovered miRNA genes are also believed by those skilled in the art to modulate expression of other genes by complementary binding, although specific complementary binding sites of these other miRNA genes have not yet been found (Ruvkun G., Perspective: Glimpses of a tiny RNA world, Science 294, 779 (2001)).

[1071] It is yet further appreciated that a function of VGAM79 is inhibition of expression of host target genes, as part of a novel viral mechanism of attacking a host. Accordingly, utilities of VGAM79 include diagnosis, prevention and treatment of viral infection by Vaccinia virus. Specific functions, and accordingly utilities, of VGAM79 correlate with, and may be deduced from, the identity of the host target genes which VGAM79 binds and inhibits, and the function of these host target genes, as elaborated hereinbelow.

[1072] Nucleotide sequences of the VGAM79 precursor RNA, herein designated VGAM PRECURSOR RNA, and of the diced VGAM79 RNA, herein designated VGAM RNA, and a schematic representation of the secondary folding of VGAM79 folded precursor RNA, herein designated VGAM FOLDED PRECURSOR RNA, of VGAM79 are further described hereinbelow with reference to Table 1.

[1073] Nucleotide sequences of host target binding sites, such as BINDING SITE-I, BINDING SITE-II and BINDING SITE-III of FIG. 1, found on, and schematic representation of the complementarity of each of these host target binding sites to VGAM79 RNA, herein designated VGAM RNA, are described hereinbelow with reference to Table 2.

[1074] FIG. 1 further provides a conceptual description of another novel bioinformatically detected viral gene of the present invention, referred to here as Viral Genomic Address Messenger 80 (VGAM80) viral gene, which modulates expression of respective host target genes thereof, the function and utility of which host target genes is known in the art.

[1075] VGAM80 is a novel bioinformatically detected regulatory, non protein coding, viral micro RNA (miRNA) gene. The method by which VGAM80 was detected is described hereinabove with reference to FIGS. 2-8.

[1076] VGAM80 gene, herein designated VGAM GENE, is a viral gene contained in the genome of Vaccinia virus. VGAM80 host target gene, herein designated VGAM HOST TARGET GENE, is a human gene contained in the human genome.

[1077] VGAM80 gene, herein designated VGAM GENE, encodes a VGAM80 precursor RNA, herein designated VGAM PRECURSOR RNA. Similar to other miRNA genes, and unlike most ordinary genes, VGAM80 precursor RNA, herein designated VGAM PRECURSOR RNA, does not encode a protein. A nucleotide sequence identical or highly similar to the nucleotide sequence of VGAM80 precursor RNA is designated SEQ ID:66, and is provided hereinbelow with reference to the sequence listing part. Nucleotide sequence SEQ ID:66 is located at position 18904 relative to the genome of Vaccinia virus.

[1078] VGAM80 precursor RNA, herein designated VGAM PRECURSOR RNA, folds onto itself, forming VGAM80 folded precursor RNA, herein designated VGAM FOLDED PRECURSOR RNA, which has a two-dimensional hairpin structure. As is well known in the art, this hairpin structure, is typical of RNA encoded by miRNA genes, and is due to the fact that the nucleotide sequence of the first half of the RNA encoded by a miRNA gene is an accurate or partial inversed-reversed sequence of the nucleotide sequence of the second half thereof.

[1079] An enzyme complex designated DICER COMPLEX, dices the VGAM80 folded precursor RNA, herein designated VGAM FOLDED PRECURSOR RNA, into VGAM80 RNA, herein designated VGAM RNA, a single stranded ˜22 nt long RNA segment. As is known in the art, dicing of a hairpin structured RNA precursor product into a short ˜22 nt RNA segment is catalyzed by an enzyme complex comprising an enzyme called Dicer together with other necessary proteins. A probable (over 70%) nucleotide sequence of VGAM80 RNA is designated SEQ ID:415, and is provided hereinbelow with reference to the sequence listing part.

[1080] VGAM80 host target gene, herein designated VGAM HOST TARGET GENE, encodes a corresponding messenger RNA, VGAM80 host target RNA, herein designated VGAM HOST TARGET RNA. VGAM80 host target RNA, herein designated VGAM HOST TARGET RNA, comprises three regions, as is typical of mRNA of a protein coding gene: a 5 untranslated region, a protein coding region and a 3 untranslated region, designated 5UTR, PROTEIN CODING and 3UTR respectively.

[1081] VGAM80 RNA, herein designated VGAM RNA, binds complementarily to one or more host target binding sites located in untranslated regions of VGAM80 host target RNA, herein designated VGAM HOST TARGET RNA. This complementary binding is due to the fact that the nucleotide sequence of VGAM80 RNA, herein designated VGAM RNA, is an accurate or a partial inversed-reversed sequence of the nucleotide sequence of each of the host target binding sites. As an illustration, FIG. 1 shows 3 such host target binding sites, designated BINDING SITE I, BINDING SITE II and BINDING SITE III respectively. It is appreciated that the number of host target binding sites shown in FIG. 1 is meant as an illustration only, and is not meant to be limiting VGAM80 RNA, herein designated VGAM RNA, may have a different number of host target binding sites in untranslated regions of a VGAM80 host target RNA, herein designated VGAM HOST TARGET RNA. It is further appreciated that while FIG. 1 depicts host target binding sites in the 3UTR region, this is meant as an example only these host target binding sites may be located in the 3UTR region, the 5UTR region, or in both 3UTR and 5UTR regions.

[1082] The complementary binding of VGAM80 RNA, herein designated VGAM RNA, to host target binding sites on VGAM80 host target RNA, herein designated VGAM HOST TARGET RNA, such as BINDING SITE I, BINDING SITE II and BINDING SITE III, inhibits translation of VGAM80 host target RNA, herein designated VGAM HOST TARGET RNA, into VGAM80 host target protein, herein designated VGAM HOST TARGET PROTEIN. VGAM host target protein is therefore outlined by a broken line.

[1083] It is appreciated that VGAM80 host target gene, herein designated VGAM HOST TARGET GENE, in fact represents a plurality of VGAM80 host target genes. The mRNA of each one of this plurality of VGAM80 host target genes comprises one or more host target binding sites, each having a nucleotide sequence which is at least partly complementary to VGAM80 RNA, herein designated VGAM RNA, and which when bound by VGAM80 RNA, herein designated VGAM RNA, causes inhibition of translation of respective one or more VGAM80 host target proteins.

[1084] It is further appreciated by one skilled in the art that the mode of translational inhibition illustrated by FIG. 1 with specific reference to translational inhibition exerted by VGAM80 gene, herein designated VGAM GENE, on one or more VGAM80 host target gene, herein designated VGAM HOST TARGET GENE, is in fact common to other known non-viral miRNA genes. As mentioned hereinabove with reference to the background section, although a specific complementary binding site has been demonstrated only for some of the known miRNA genes (primarily Lin-4 and Let-7), all other recently discovered miRNA genes are also believed by those skilled in the art to modulate expression of other genes by complementary binding, although specific complementary binding sites of these other miRNA genes have not yet been found (Ruvkun G., Perspective: Glimpses of a tiny RNA world, Science 294, 779 (2001)).

[1085] It is yet further appreciated that a function of VGAM80 is inhibition of expression of host target genes, as part of a novel viral mechanism of attacking a host. Accordingly, utilities of VGAM80 include diagnosis, prevention and treatment of viral infection by Vaccinia virus. Specific functions, and accordingly utilities, of VGAM80 correlate with, and may be deduced from, the identity of the host target genes which VGAM80 binds and inhibits, and the function of these host target genes, as elaborated hereinbelow.

[1086] Nucleotide sequences of the VGAM80 precursor RNA, herein designated VGAM PRECURSOR RNA, and of the diced VGAM80 RNA, herein designated VGAM RNA, and a schematic representation of the secondary folding of VGAM80 folded precursor RNA, herein designated VGAM FOLDED PRECURSOR RNA, of VGAM80 are further described hereinbelow with reference to Table 1.

[1087] Nucleotide sequences of host target binding sites, such as BINDING SITE-I, BINDING SITE-II and BINDING SITE-III of FIG. 1, found on, and schematic representation of the complementarity of each of these host target binding sites to VGAM80 RNA, herein designated VGAM RNA, are described hereinbelow with reference to Table 2.

[1088] FIG. 1 further provides a conceptual description of another novel bioinformatically detected viral gene of the present invention, referred to here as Viral Genomic Address Messenger 81 (VGAM81) viral gene, which modulates expression of respective host target genes thereof, the function and utility of which host target genes is known in the art.

[1089] VGAM81 is a novel bioinformatically detected regulatory, non protein coding, viral micro RNA (miRNA) gene. The method by which VGAM81 was detected is described hereinabove with reference to FIGS. 2-8.

[1090] VGAM81 gene, herein designated VGAM GENE, is a viral gene contained in the genome of Vaccinia virus. VGAM81 host target gene, herein designated VGAM HOST TARGET GENE, is a human gene contained in the human genome.

[1091] VGAM81 gene, herein designated VGAM GENE, encodes a VGAM81 precursor RNA, herein designated VGAM PRECURSOR RNA. Similar to other miRNA genes, and unlike most ordinary genes, VGAM81 precursor RNA, herein designated VGAM PRECURSOR RNA, does not encode a protein. A nucleotide sequence identical or highly similar to the nucleotide sequence of VGAM81 precursor RNA is designated SEQ ID:67, and is provided hereinbelow with reference to the sequence listing part. Nucleotide sequence SEQ ID:67 is located at position 27652 relative to the genome of Vaccinia virus.

[1092] VGAM81 precursor RNA, herein designated VGAM PRECURSOR RNA, folds onto itself, forming VGAM81 folded precursor RNA, herein designated VGAM FOLDED PRECURSOR RNA, which has a two-dimensional hairpin structure. As is well known in the art, this hairpin structure, is typical of RNA encoded by miRNA genes, and is due to the fact that the nucleotide sequence of the first half of the RNA encoded by a miRNA gene is an accurate or partial inversed-reversed sequence of the nucleotide sequence of the second half thereof.

[1093] An enzyme complex designated DICER COMPLEX, dices the VGAM81 folded precursor RNA, herein designated VGAM FOLDED PRECURSOR RNA, into VGAM81 RNA, herein designated VGAM RNA, a single stranded ˜22 nt long RNA segment. As is known in the art, dicing of a hairpin structured RNA precursor product into a short ˜22 nt RNA segment is catalyzed by an enzyme complex comprising an enzyme called Dicer together with other necessary proteins. A probable (over 71%) nucleotide sequence of VGAM81 RNA is designated SEQ ID:416, and is provided hereinbelow with reference to the sequence listing part.

[1094] VGAM81 host target gene, herein designated VGAM HOST TARGET GENE, encodes a corresponding messenger RNA, VGAM81 host target RNA, herein designated VGAM HOST TARGET RNA. VGAM81 host target RNA, herein designated VGAM HOST TARGET RNA, comprises three regions, as is typical of mRNA of a protein coding gene: a 5 untranslated region, a protein coding region and a 3 untranslated region, designated 5UTR, PROTEIN CODING and 3UTR respectively.

[1095] VGAM81 RNA, herein designated VGAM RNA, binds complementarily to one or more host target binding sites located in untranslated regions of VGAM81 host target RNA, herein designated VGAM HOST TARGET RNA. This complementary binding is due to the fact that the nucleotide sequence of VGAM81 RNA, herein designated VGAM RNA, is an accurate or a partial inversed-reversed sequence of the nucleotide sequence of each of the host target binding sites. As an illustration, FIG. 1 shows 3 such host target binding sites, designated BINDING SITE I, BINDING SITE II and BINDING SITE III respectively. It is appreciated that the number of host target binding sites shown in FIG. 1 is meant as an illustration only, and is not meant to be limiting VGAM81 RNA, herein designated VGAM RNA, may have a different number of host target binding sites in untranslated regions of a VGAM81 host target RNA, herein designated VGAM HOST TARGET RNA. It is further appreciated that while FIG. 1 depicts host target binding sites in the 3UTR region, this is meant as an example only these host target binding sites may be located in the 3UTR region, the 5UTR region, or in both 3UTR and 5UTR regions.

[1096] The complementary binding of VGAM81 RNA, herein designated VGAM RNA, to host target binding sites on VGAM81 host target RNA, herein designated VGAM HOST TARGET RNA, such as BINDING SITE I, BINDING SITE II and BINDING SITE III, inhibits translation of VGAM81 host target RNA, herein designated VGAM HOST TARGET RNA, into VGAM81 host target protein, herein designated VGAM HOST TARGET PROTEIN. VGAM host target protein is therefore outlined by a broken line.

[1097] It is appreciated that VGAM81 host target gene, herein designated VGAM HOST TARGET GENE, in fact represents a plurality of VGAM81 host target genes. The mRNA of each one of this plurality of VGAM81 host target genes comprises one or more host target binding sites, each having a nucleotide sequence which is at least partly complementary to VGAM81 RNA, herein designated VGAM RNA, and which when bound by VGAM81 RNA, herein designated VGAM RNA, causes inhibition of translation of respective one or more VGAM81 host target proteins.

[1098] It is further appreciated by one skilled in the art that the mode of translational inhibition illustrated by FIG. 1 with specific reference to translational inhibition exerted by VGAM81 gene, herein designated VGAM GENE, on one or more VGAM81 host target gene, herein designated VGAM HOST TARGET GENE, is in fact common to other known non-viral miRNA genes. As mentioned hereinabove with reference to the background section, although a specific complementary binding site has been demonstrated only for some of the known miRNA genes (primarily Lin-4 and Let-7), all other recently discovered miRNA genes are also believed by those skilled in the art to modulate expression of other genes by complementary binding, although specific complementary binding sites of these other miRNA genes have not yet been found (Ruvkun G., Perspective: Glimpses of a tiny RNA world, Science 294, 779 (2001)).

[1099] It is yet further appreciated that a function of VGAM81 is inhibition of expression of host target genes, as part of a novel viral mechanism of attacking a host. Accordingly, utilities of VGAM81 include diagnosis, prevention and treatment of viral infection by Vaccinia virus. Specific functions, and accordingly utilities, of VGAM81 correlate with, and may be deduced from, the identity of the host target genes which VGAM81 binds and inhibits, and the function of these host target genes, as elaborated hereinbelow.

[1100] Nucleotide sequences of the VGAM81 precursor RNA, herein designated VGAM PRECURSOR RNA, and of the diced VGAM81 RNA, herein designated VGAM RNA, and a schematic representation of the secondary folding of VGAM81 folded precursor RNA, herein designated VGAM FOLDED PRECURSOR RNA, of VGAM81 are further described hereinbelow with reference to Table 1.

[1101] Nucleotide sequences of host target binding sites, such as BINDING SITE-I, BINDING SITE-II and BINDING SITE-III of FIG. 1, found on, and schematic representation of the complementarity of each of these host target binding sites to VGAM81 RNA, herein designated VGAM RNA, are described hereinbelow with reference to Table 2.

[1102] FIG. 1 further provides a conceptual description of another novel bioinformatically detected viral gene of the present invention, referred to here as Viral Genomic Address Messenger 82 (VGAM82) viral gene, which modulates expression of respective host target genes thereof, the function and utility of which host target genes is known in the art.

[1103] VGAM82 is a novel bioinformatically detected regulatory, non protein coding, viral micro RNA (miRNA) gene. The method by which VGAM82 was detected is described hereinabove with reference to FIGS. 2-8.

[1104] VGAM82 gene, herein designated VGAM GENE, is a viral gene contained in the genome of Vaccinia virus. VGAM82 host target gene, herein designated VGAM HOST TARGET GENE, is a human gene contained in the human genome.

[1105] VGAM82 gene, herein designated VGAM GENE, encodes a VGAM82 precursor RNA, herein designated VGAM PRECURSOR RNA. Similar to other miRNA genes, and unlike most ordinary genes, VGAM82 precursor RNA, herein designated VGAM PRECURSOR RNA, does not encode a protein. A nucleotide sequence identical or highly similar to the nucleotide sequence of VGAM82 precursor RNA is designated SEQ ID:68, and is provided hereinbelow with reference to the sequence listing part. Nucleotide sequence SEQ ID:68 is located at position 24541 relative to the genome of Vaccinia virus.

[1106] VGAM82 precursor RNA, herein designated VGAM PRECURSOR RNA, folds onto itself, forming VGAM82 folded precursor RNA, herein designated VGAM FOLDED PRECURSOR RNA, which has a two-dimensional hairpin structure. As is well known in the art, this hairpin structure, is typical of RNA encoded by miRNA genes, and is due to the fact that the nucleotide sequence of the first half of the RNA encoded by a miRNA gene is an accurate or partial inversed-reversed sequence of the nucleotide sequence of the second half thereof.

[1107] An enzyme complex designated DICER COMPLEX, dices the VGAM82 folded precursor RNA, herein designated VGAM FOLDED PRECURSOR RNA, into VGAM82 RNA, herein designated VGAM RNA, a single stranded ˜22 nt long RNA segment. As is known in the art, dicing of a hairpin structured RNA precursor product into a short ˜22 nt RNA segment is catalyzed by an enzyme complex comprising an enzyme called Dicer together with other necessary proteins. A probable (over 86%) nucleotide sequence of VGAM82 RNA is designated SEQ ID:417, and is provided hereinbelow with reference to the sequence listing part.

[1108] VGAM82 host target gene, herein designated VGAM HOST TARGET GENE, encodes a corresponding messenger RNA, VGAM82 host target RNA, herein designated VGAM HOST TARGET RNA. VGAM82 host target RNA, herein designated VGAM HOST TARGET RNA, comprises three regions, as is typical of mRNA of a protein coding gene: a 5 untranslated region, a protein coding region and a 3 untranslated region, designated 5UTR, PROTEIN CODING and 3UTR respectively.

[1109] VGAM82 RNA, herein designated VGAM RNA, binds complementarily to one or more host target binding sites located in untranslated regions of VGAM82 host target RNA, herein designated VGAM HOST TARGET RNA. This complementary binding is due to the fact that the nucleotide sequence of VGAM82 RNA, herein designated VGAM RNA, is an accurate or a partial inversed-reversed sequence of the nucleotide sequence of each of the host target binding sites. As an illustration, FIG. 1 shows 3 such host target binding sites, designated BINDING SITE I, BINDING SITE II and BINDING SITE III respectively. It is appreciated that the number of host target binding sites shown in FIG. 1 is meant as an illustration only, and is not meant to be limiting VGAM82 RNA, herein designated VGAM RNA, may have a different number of host target binding sites in untranslated regions of a VGAM82 host target RNA, herein designated VGAM HOST TARGET RNA. It is further appreciated that while FIG. 1 depicts host target binding sites in the 3UTR region, this is meant as an example only these host target binding sites may be located in the 3UTR region, the 5UTR region, or in both 3UTR and 5UTR regions.

[1110] The complementary binding of VGAM82 RNA, herein designated VGAM RNA, to host target binding sites on VGAM82 host target RNA, herein designated VGAM HOST TARGET RNA, such as BINDING SITE I, BINDING SITE II and BINDING SITE III, inhibits translation of VGAM82 host target RNA, herein designated VGAM HOST TARGET RNA, into VGAM82 host target protein, herein designated VGAM HOST TARGET PROTEIN. VGAM host target protein is therefore outlined by a broken line.

[1111] It is appreciated that VGAM82 host target gene, herein designated VGAM HOST TARGET GENE, in fact represents a plurality of VGAM82 host target genes. The mRNA of each one of this plurality of VGAM82 host target genes comprises one or more host target binding sites, each having a nucleotide sequence which is at least partly complementary to VGAM82 RNA, herein designated VGAM RNA, and which when bound by VGAM82 RNA, herein designated VGAM RNA, causes inhibition of translation of respective one or more VGAM82 host target proteins.

[1112] It is further appreciated by one skilled in the art that the mode of translational inhibition illustrated by FIG. 1 with specific reference to translational inhibition exerted by VGAM82 gene, herein designated VGAM GENE, on one or more VGAM82 host target gene, herein designated VGAM HOST TARGET GENE, is in fact common to other known non-viral miRNA genes. As mentioned hereinabove with reference to the background section, although a specific complementary binding site has been demonstrated only for some of the known miRNA genes (primarily Lin-4 and Let-7), all other recently discovered miRNA genes are also believed by those skilled in the art to modulate expression of other genes by complementary binding, although specific complementary binding sites of these other miRNA genes have not yet been found (Ruvkun G., Perspective: Glimpses of a tiny RNA world, Science 294, 779 (2001)). It is yet further appreciated that a function of VGAM82 is inhibition of expression of host target genes, as part of a novel viral mechanism of attacking a host. Accordingly, utilities of VGAM82 include diagnosis, prevention and treatment of viral infection by Vaccinia virus. Specific functions, and accordingly utilities, of VGAM82 correlate with, and may be deduced from, the identity of the host target genes which VGAM82 binds and inhibits, and the function of these host target genes, as elaborated hereinbelow.

[1113] Nucleotide sequences of the VGAM82 precursor RNA, herein designated VGAM PRECURSOR RNA, and of the diced VGAM82 RNA, herein designated VGAM RNA, and a schematic representation of the secondary folding of VGAM82 folded precursor RNA, herein designated VGAM FOLDED PRECURSOR RNA, of VGAM82 are further described hereinbelow with reference to Table 1.

[1114] Nucleotide sequences of host target binding sites, such as BINDING SITE-I, BINDING SITE-II and BINDING SITE-III of FIG. 1, found on, and schematic representation of the complementarity of each of these host target binding sites to VGAM82 RNA, herein designated VGAM RNA, are described hereinbelow with reference to Table 2.

[1115] FIG. 1 further provides a conceptual description of another novel bioinformatically detected viral gene of the present invention, referred to here as Viral Genomic Address Messenger 83 (VGAM83) viral gene, which modulates expression of respective host target genes thereof, the function and utility of which host target genes is known in the art.

[1116] VGAM83 is a novel bioinformatically detected regulatory, non protein coding, viral micro RNA (miRNA) gene. The method by which VGAM83 was detected is described hereinabove with reference to FIGS. 2-8.

[1117] VGAM83 gene, herein designated VGAM GENE, is a viral gene contained in the genome of Vaccinia virus. VGAM83 host target gene, herein designated VGAM HOST TARGET GENE, is a human gene contained in the human genome.

[1118] VGAM83 gene, herein designated VGAM GENE, encodes a VGAM83 precursor RNA, herein designated VGAM PRECURSOR RNA. Similar to other miRNA genes, and unlike most ordinary genes, VGAM83 precursor RNA, herein designated VGAM PRECURSOR RNA, does not encode a protein. A nucleotide sequence identical or highly similar to the nucleotide sequence of VGAM83 precursor RNA is designated SEQ ID:69, and is provided hereinbelow with reference to the sequence listing part. Nucleotide sequence SEQ ID:69 is located at position 23600 relative to the genome of Vaccinia virus.

[1119] VGAM83 precursor RNA, herein designated VGAM PRECURSOR RNA, folds onto itself, forming VGAM83 folded precursor RNA, herein designated VGAM FOLDED PRECURSOR RNA, which has a two-dimensional hairpin structure. As is well known in the art, this hairpin structure, is typical of RNA encoded by miRNA genes, and is due to the fact that the nucleotide sequence of the first half of the RNA encoded by a miRNA gene is an accurate or partial inversed-reversed sequence of the nucleotide sequence of the second half thereof.

[1120] An enzyme complex designated DICER COMPLEX, dices the VGAM83 folded precursor RNA, herein designated VGAM FOLDED PRECURSOR RNA, into VGAM83 RNA, herein designated VGAM RNA, a single stranded ˜22 nt long RNA segment. As is known in the art, dicing of a hairpin structured RNA precursor product into a short ˜22 nt RNA segment is catalyzed by an enzyme complex comprising an enzyme called Dicer together with other necessary proteins. A probable (over 84%) nucleotide sequence of VGAM83 RNA is designated SEQ ID:418, and is provided hereinbelow with reference to the sequence listing part.

[1121] VGAM83 host target gene, herein designated VGAM HOST TARGET GENE, encodes a corresponding messenger RNA, VGAM83 host target RNA, herein designated VGAM HOST TARGET RNA. VGAM83 host target RNA, herein designated VGAM HOST TARGET RNA, comprises three regions, as is typical of mRNA of a protein coding gene: a 5 untranslated region, a protein coding region and a 3 untranslated region, designated 5UTR, PROTEIN CODING and 3UTR respectively.

[1122] VGAM83 RNA, herein designated VGAM RNA, binds complementarily to one or more host target binding sites located in untranslated regions of VGAM83 host target RNA, herein designated VGAM HOST TARGET RNA. This complementary binding is due to the fact that the nucleotide sequence of VGAM83 RNA, herein designated VGAM RNA, is an accurate or a partial inversed-reversed sequence of the nucleotide sequence of each of the host target binding sites. As an illustration, FIG. 1 shows 3 such host target binding sites, designated BINDING SITE I, BINDING SITE II and BINDING SITE III respectively. It is appreciated that the number of host target binding sites shown in FIG. 1 is meant as an illustration only, and is not meant to be limiting VGAM83 RNA, herein designated VGAM RNA, may have a different number of host target binding sites in untranslated regions of a VGAM83 host target RNA, herein designated VGAM HOST TARGET RNA. It is further appreciated that while FIG. 1 depicts host target binding sites in the 3UTR region, this is meant as an example only these host target binding sites may be located in the 3UTR region, the 5UTR region, or in both 3UTR and 5UTR regions.

[1123] The complementary binding of VGAM83 RNA, herein designated VGAM RNA, to host target binding sites on VGAM83 host target RNA, herein designated VGAM HOST TARGET RNA, such as BINDING SITE I, BINDING SITE II and BINDING SITE III, inhibits translation of VGAM83 host target RNA, herein designated VGAM HOST TARGET RNA, into VGAM83 host target protein, herein designated VGAM HOST TARGET PROTEIN. VGAM host target protein is therefore outlined by a broken line.

[1124] It is appreciated that VGAM83 host target gene, herein designated VGAM HOST TARGET GENE, in fact represents a plurality of VGAM83 host target genes. The mRNA of each one of this plurality of VGAM83 host target genes comprises one or more host target binding sites, each having a nucleotide sequence which is at least partly complementary to VGAM83 RNA, herein designated VGAM RNA, and which when bound by VGAM83 RNA, herein designated VGAM RNA, causes inhibition of translation of respective one or more VGAM83 host target proteins.

[1125] It is further appreciated by one skilled in the art that the mode of translational inhibition illustrated by FIG. 1 with specific reference to translational inhibition exerted by VGAM83 gene, herein designated VGAM GENE, on one or more VGAM83 host target gene, herein designated VGAM HOST TARGET GENE, is in fact common to other known non-viral miRNA genes. As mentioned hereinabove with reference to the background section, although a specific complementary binding site has been demonstrated only for some of the known miRNA genes (primarily Lin-4 and Let-7), all other recently discovered miRNA genes are also believed by those skilled in the art to modulate expression of other genes by complementary binding, although specific complementary binding sites of these other miRNA genes have not yet been found (Ruvkun G., Perspective: Glimpses of a tiny RNA world, Science 294, 779 (2001)).

[1126] It is yet further appreciated that a function of VGAM83 is inhibition of expression of host target genes, as part of a novel viral mechanism of attacking a host. Accordingly, utilities of VGAM83 include diagnosis, prevention and treatment of viral infection by Vaccinia virus. Specific functions, and accordingly utilities, of VGAM83 correlate with, and may be deduced from, the identity of the host target genes which VGAM83 binds and inhibits, and the function of these host target genes, as elaborated hereinbelow.

[1127] Nucleotide sequences of the VGAM83 precursor RNA, herein designated VGAM PRECURSOR RNA, and of the diced VGAM83 RNA, herein designated VGAM RNA, and a schematic representation of the secondary folding of VGAM83 folded precursor RNA, herein designated VGAM FOLDED PRECURSOR RNA, of VGAM83 are further described hereinbelow with reference to Table 1.

[1128] Nucleotide sequences of host target binding sites, such as BINDING SITE-I, BINDING SITE-II and BINDING SITE-III of FIG. 1, found on, and schematic representation of the complementarity of each of these host target binding sites to VGAM83 RNA, herein designated VGAM RNA, are described hereinbelow with reference to Table 2.

[1129] FIG. 1 further provides a conceptual description of another novel bioinformatically detected viral gene of the present invention, referred to here as Viral Genomic Address Messenger 84 (VGAM84) viral gene, which modulates expression of respective host target genes thereof, the function and utility of which host target genes is known in the art.

[1130] VGAM84 is a novel bioinformatically detected regulatory, non protein coding, viral micro RNA (miRNA) gene. The method by which VGAM84 was detected is described hereinabove with reference to FIGS. 2-8.

[1131] VGAM84 gene, herein designated VGAM GENE, is a viral gene contained in the genome of Vaccinia virus. VGAM84 host target gene, herein designated VGAM HOST TARGET GENE, is a human gene contained in the human genome.

[1132] VGAM84 gene, herein designated VGAM GENE, encodes a VGAM84 precursor RNA, herein designated VGAM PRECURSOR RNA. Similar to other miRNA genes, and unlike most ordinary genes, VGAM84 precursor RNA, herein designated VGAM PRECURSOR RNA, does not encode a protein. A nucleotide sequence identical or highly similar to the nucleotide sequence of VGAM84 precursor RNA is designated SEQ ID:70, and is provided hereinbelow with reference to the sequence listing part. Nucleotide sequence SEQ ID:70 is located at position 27761 relative to the genome of Vaccinia virus.

[1133] VGAM84 precursor RNA, herein designated VGAM PRECURSOR RNA, folds onto itself, forming VGAM84 folded precursor RNA, herein designated VGAM FOLDED PRECURSOR RNA, which has a two-dimensional hairpin structure. As is well known in the art, this hairpin structure, is typical of RNA encoded by miRNA genes, and is due to the fact that the nucleotide sequence of the first half of the RNA encoded by a miRNA gene is an accurate or partial inversed-reversed sequence of the nucleotide sequence of the second half thereof.

[1134] An enzyme complex designated DICER COMPLEX, dices the VGAM84 folded precursor RNA, herein designated VGAM FOLDED PRECURSOR RNA, into VGAM84 RNA, herein designated VGAM RNA, a single stranded ˜22 nt long RNA segment. As is known in the art, dicing of a hairpin structured RNA precursor product into a short ˜22 nt RNA segment is catalyzed by an enzyme complex comprising an enzyme called Dicer together with other necessary proteins. A probable (over 84%) nucleotide sequence of VGAM84 RNA is designated SEQ ID:419, and is provided hereinbelow with reference to the sequence listing part.

[1135] VGAM84 host target gene, herein designated VGAM HOST TARGET GENE, encodes a corresponding messenger RNA, VGAM84 host target RNA, herein designated VGAM HOST TARGET RNA. VGAM84 host target RNA, herein designated VGAM HOST TARGET RNA, comprises three regions, as is typical of mRNA of a protein coding gene: a 5 untranslated region, a protein coding region and a 3 untranslated region, designated 5UTR, PROTEIN CODING and 3UTR respectively.

[1136] VGAM84 RNA, herein designated VGAM RNA, binds complementarily to one or more host target binding sites located in untranslated regions of VGAM84 host target RNA, herein designated VGAM HOST TARGET RNA. This complementary binding is due to the fact that the nucleotide sequence of VGAM84 RNA, herein designated VGAM RNA, is an accurate or a partial inversed-reversed sequence of the nucleotide sequence of each of the host target binding sites. As an illustration, FIG. 1 shows 3 such host target binding sites, designated BINDING SITE I, BINDING SITE II and BINDING SITE III respectively. It is appreciated that the number of host target binding sites shown in FIG. 1 is meant as an illustration only, and is not meant to be limiting VGAM84 RNA, herein designated VGAM RNA, may have a different number of host target binding sites in untranslated regions of a VGAM84 host target RNA, herein designated VGAM HOST TARGET RNA. It is further appreciated that while FIG. 1 depicts host target binding sites in the 3UTR region, this is meant as an example only these host target binding sites may be located in the 3UTR region, the 5UTR region, or in both 3UTR and 5UTR regions.

[1137] The complementary binding of VGAM84 RNA, herein designated VGAM RNA, to host target binding sites on VGAM84 host target RNA, herein designated VGAM HOST TARGET RNA, such as BINDING SITE I, BINDING SITE II and BINDING SITE III, inhibits translation of VGAM84 host target RNA, herein designated VGAM HOST TARGET RNA, into VGAM84 host target protein, herein designated VGAM HOST TARGET PROTEIN. VGAM host target protein is therefore outlined by a broken line.

[1138] It is appreciated that VGAM84 host target gene, herein designated VGAM HOST TARGET GENE, in fact represents a plurality of VGAM84 host target genes. The mRNA of each one of this plurality of VGAM84 host target genes comprises one or more host target binding sites, each having a nucleotide sequence which is at least partly complementary to VGAM84 RNA, herein designated VGAM RNA, and which when bound by VGAM84 RNA, herein designated VGAM RNA, causes inhibition of translation of respective one or more VGAM84 host target proteins.

[1139] It is further appreciated by one skilled in the art that the mode of translational inhibition illustrated by FIG. 1 with specific reference to translational inhibition exerted by VGAM84 gene, herein designated VGAM GENE, on one or more VGAM84 host target gene, herein designated VGAM HOST TARGET GENE, is in fact common to other known non-viral miRNA genes. As mentioned hereinabove with reference to the background section, although a specific complementary binding site has been demonstrated only for some of the known miRNA genes (primarily Lin-4 and Let-7), all other recently discovered miRNA genes are also believed by those skilled in the art to modulate expression of other genes by complementary binding, although specific complementary binding sites of these other miRNA genes have not yet been found (Ruvkun G., Perspective: Glimpses of a tiny RNA world, Science 294, 779 (2001)).

[1140] It is yet further appreciated that a function of VGAM84 is inhibition of expression of host target genes, as part of a novel viral mechanism of attacking a host. Accordingly, utilities of VGAM84 include diagnosis, prevention and treatment of viral infection by Vaccinia virus. Specific functions, and accordingly utilities, of VGAM84 correlate with, and may be deduced from, the identity of the host target genes which VGAM84 binds and inhibits, and the function of these host target genes, as elaborated hereinbelow.

[1141] Nucleotide sequences of the VGAM84 precursor RNA, herein designated VGAM PRECURSOR RNA, and of the diced VGAM84 RNA, herein designated VGAM RNA, and a schematic representation of the secondary folding of VGAM84 folded precursor RNA, herein designated VGAM FOLDED PRECURSOR RNA, of VGAM84 are further described hereinbelow with reference to Table 1.

[1142] Nucleotide sequences of host target binding sites, such as BINDING SITE-I, BINDING SITE-II and BINDING SITE-III of FIG. 1, found on, and schematic representation of the complementarity of each of these host target binding sites to VGAM84 RNA, herein designated VGAM RNA, are described hereinbelow with reference to Table 2.

[1143] FIG. 1 further provides a conceptual description of another novel bioinformatically detected viral gene of the present invention, referred to here as Viral Genomic Address Messenger 85 (VGAM85) viral gene, which modulates expression of respective host target genes thereof, the function and utility of which host target genes is known in the art.

[1144] VGAM85 is a novel bioinformatically detected regulatory, non protein coding, viral micro RNA (miRNA) gene. The method by which VGAM85 was detected is described hereinabove with reference to FIGS. 2-8.

[1145] VGAM85 gene, herein designated VGAM GENE, is a viral gene contained in the genome of Vaccinia virus. VGAM85 host target gene, herein designated VGAM HOST TARGET GENE, is a human gene contained in the human genome.

[1146] VGAM85 gene, herein designated VGAM GENE, encodes a VGAM85 precursor RNA, herein designated VGAM PRECURSOR RNA. Similar to other miRNA genes, and unlike most ordinary genes, VGAM85 precursor RNA, herein designated VGAM PRECURSOR RNA, does not encode a protein. A nucleotide sequence identical or highly similar to the nucleotide sequence of VGAM85 precursor RNA is designated SEQ ID:71, and is provided hereinbelow with reference to the sequence listing part. Nucleotide sequence SEQ ID:71 is located at position 26098 relative to the genome of Vaccinia virus.

[1147] VGAM85 precursor RNA, herein designated VGAM PRECURSOR RNA, folds onto itself, forming VGAM85 folded precursor RNA, herein designated VGAM FOLDED PRECURSOR RNA, which has a two-dimensional hairpin structure. As is well known in the art, this hairpin structure, is typical of RNA encoded by miRNA genes, and is due to the fact that the nucleotide sequence of the first half of the RNA encoded by a miRNA gene is an accurate or partial inversed-reversed sequence of the nucleotide sequence of the second half thereof.

[1148] An enzyme complex designated DICER COMPLEX, dices the VGAM85 folded precursor RNA, herein designated VGAM FOLDED PRECURSOR RNA, into VGAM85 RNA, herein designated VGAM RNA, a single stranded ˜22 nt long RNA segment. As is known in the art, dicing of a hairpin structured RNA precursor product into a short ˜22 nt RNA segment is catalyzed by an enzyme complex comprising an enzyme called Dicer together with other necessary proteins. A probable (over 90%) nucleotide sequence of VGAM85 RNA is designated SEQ ID:420, and is provided hereinbelow with reference to the sequence listing part.

[1149] VGAM85 host target gene, herein designated VGAM HOST TARGET GENE, encodes a corresponding messenger RNA, VGAM85 host target RNA, herein designated VGAM HOST TARGET RNA. VGAM85 host target RNA, herein designated VGAM HOST TARGET RNA, comprises three regions, as is typical of mRNA of a protein coding gene: a 5 untranslated region, a protein coding region and a 3 untranslated region, designated 5UTR, PROTEIN CODING and 3UTR respectively.

[1150] VGAM85 RNA, herein designated VGAM RNA, binds complementarily to one or more host target binding sites located in untranslated regions of VGAM85 host target RNA, herein designated VGAM HOST TARGET RNA. This complementary binding is due to the fact that the nucleotide sequence of VGAM85 RNA, herein designated VGAM RNA, is an accurate or a partial inversed-reversed sequence of the nucleotide sequence of each of the host target binding sites. As an illustration, FIG. 1 shows 3 such host target binding sites, designated BINDING SITE I, BINDING SITE II and BINDING SITE III respectively. It is appreciated that the number of host target binding sites shown in FIG. 1 is meant as an illustration only, and is not meant to be limiting VGAM85 RNA, herein designated VGAM RNA, may have a different number of host target binding sites in untranslated regions of a VGAM85 host target RNA, herein designated VGAM HOST TARGET RNA. It is further appreciated that while FIG. 1 depicts host target binding sites in the 3UTR region, this is meant as an example only these host target binding sites may be located in the 3UTR region, the 5UTR region, or in both 3UTR and 5UTR regions.

[1151] The complementary binding of VGAM85 RNA, herein designated VGAM RNA, to host target binding sites on VGAM85 host target RNA, herein designated VGAM HOST TARGET RNA, such as BINDING SITE I, BINDING SITE II and BINDING SITE III, inhibits translation of VGAM85 host target RNA, herein designated VGAM HOST TARGET RNA, into VGAM85 host target protein, herein designated VGAM HOST TARGET PROTEIN. VGAM host target protein is therefore outlined by a broken line.

[1152] It is appreciated that VGAM85 host target gene, herein designated VGAM HOST TARGET GENE, in fact represents a plurality of VGAM85 host target genes. The mRNA of each one of this plurality of VGAM85 host target genes comprises one or more host target binding sites, each having a nucleotide sequence which is at least partly complementary to VGAM85 RNA, herein designated VGAM RNA, and which when bound by VGAM85 RNA, herein designated VGAM RNA, causes inhibition of translation of respective one or more VGAM85 host target proteins.

[1153] It is further appreciated by one skilled in the art that the mode of translational inhibition illustrated by FIG. 1 with specific reference to translational inhibition exerted by VGAM85 gene, herein designated VGAM GENE, on one or more VGAM85 host target gene, herein designated VGAM HOST TARGET GENE, is in fact common to other known non-viral miRNA genes. As mentioned hereinabove with reference to the background section, although a specific complementary binding site has been demonstrated only for some of the known miRNA genes (primarily Lin-4 and Let-7), all other recently discovered miRNA genes are also believed by those skilled in the art to modulate expression of other genes by complementary binding, although specific complementary binding sites of these other miRNA genes have not yet been found (Ruvkun G., Perspective: Glimpses of a tiny RNA world, Science 294, 779 (2001)).

[1154] It is yet further appreciated that a function of VGAM85 is inhibition of expression of host target genes, as part of a novel viral mechanism of attacking a host. Accordingly, utilities of VGAM85 include diagnosis, prevention and treatment of viral infection by Vaccinia virus. Specific functions, and accordingly utilities, of VGAM85 correlate with, and may be deduced from, the identity of the host target genes which VGAM85 binds and inhibits, and the function of these host target genes, as elaborated hereinbelow.

[1155] Nucleotide sequences of the VGAM85 precursor RNA, herein designated VGAM PRECURSOR RNA, and of the diced VGAM85 RNA, herein designated VGAM RNA, and a schematic representation of the secondary folding of VGAM85 folded precursor RNA, herein designated VGAM FOLDED PRECURSOR RNA, of VGAM85 are further described hereinbelow with reference to Table 1.

[1156] Nucleotide sequences of host target binding sites, such as BINDING SITE-I, BINDING SITE-II and BINDING SITE-III of FIG. 1, found on, and schematic representation of the complementarity of each of these host target binding sites to VGAM85 RNA, herein designated VGAM RNA, are described hereinbelow with reference to Table 2.

[1157] FIG. 1 further provides a conceptual description of another novel bioinformatically detected viral gene of the present invention, referred to here as Viral Genomic Address Messenger 86 (VGAM86) viral gene, which modulates expression of respective host target genes thereof, the function and utility of which host target genes is known in the art.

[1158] VGAM86 is a novel bioinformatically detected regulatory, non protein coding, viral micro RNA (miRNA) gene. The method by which VGAM86 was detected is described hereinabove with reference to FIGS. 2-8.

[1159] VGAM86 gene, herein designated VGAM GENE, is a viral gene contained in the genome of Vaccinia virus. VGAM86 host target gene, herein designated VGAM HOST TARGET GENE, is a human gene contained in the human genome.

[1160] VGAM86 gene, herein designated VGAM GENE, encodes a VGAM86 precursor RNA, herein designated VGAM PRECURSOR RNA. Similar to other miRNA genes, and unlike most ordinary genes, VGAM86 precursor RNA, herein designated VGAM PRECURSOR RNA, does not encode a protein. A nucleotide sequence identical or highly similar to the nucleotide sequence of VGAM86 precursor RNA is designated SEQ ID:72, and is provided hereinbelow with reference to the sequence listing part. Nucleotide sequence SEQ ID:72 is located at position 25950 relative to the genome of Vaccinia virus.

[1161] VGAM86 precursor RNA, herein designated VGAM PRECURSOR RNA, folds onto itself, forming VGAM86 folded precursor RNA, herein designated VGAM FOLDED PRECURSOR RNA, which has a two-dimensional hairpin structure. As is well known in the art, this hairpin structure, is typical of RNA encoded by miRNA genes, and is due to the fact that the nucleotide sequence of the first half of the RNA encoded by a miRNA gene is an accurate or partial inversed-reversed sequence of the nucleotide sequence of the second half thereof.

[1162] An enzyme complex designated DICER COMPLEX, dices the VGAM86 folded precursor RNA, herein designated VGAM FOLDED PRECURSOR RNA, into VGAM86 RNA, herein designated VGAM RNA, a single stranded ˜22 nt long RNA segment. As is known in the art, dicing of a hairpin structured RNA precursor product into a short ˜22 nt RNA segment is catalyzed by an enzyme complex comprising an enzyme called Dicer together with other necessary proteins. A probable (over 89%) nucleotide sequence of VGAM86 RNA is designated SEQ ID:421, and is provided hereinbelow with reference to the sequence listing part.

[1163] VGAM86 host target gene, herein designated VGAM HOST TARGET GENE, encodes a corresponding messenger RNA, VGAM86 host target RNA, herein designated VGAM HOST TARGET RNA. VGAM86 host target RNA, herein designated VGAM HOST TARGET RNA, comprises three regions, as is typical of mRNA of a protein coding gene: a 5 untranslated region, a protein coding region and a 3 untranslated region, designated 5UTR, PROTEIN CODING and 3UTR respectively.

[1164] VGAM86 RNA, herein designated VGAM RNA, binds complementarily to one or more host target binding sites located in untranslated regions of VGAM86 host target RNA, herein designated VGAM HOST TARGET RNA. This complementary binding is due to the fact that the nucleotide sequence of VGAM86 RNA, herein designated VGAM RNA, is an accurate or a partial inversed-reversed sequence of the nucleotide sequence of each of the host target binding sites. As an illustration, FIG. 1 shows 3 such host target binding sites, designated BINDING SITE I, BINDING SITE II and BINDING SITE III respectively. It is appreciated that the number of host target binding sites shown in FIG. 1 is meant as an illustration only, and is not meant to be limiting VGAM86 RNA, herein designated VGAM RNA, may have a different number of host target binding sites in untranslated regions of a VGAM86 host target RNA, herein designated VGAM HOST TARGET RNA. It is further appreciated that while FIG. 1 depicts host target binding sites in the 3UTR region, this is meant as an example only these host target binding sites may be located in the 3UTR region, the 5UTR region, or in both 3UTR and 5UTR regions.

[1165] The complementary binding of VGAM86 RNA, herein designated VGAM RNA, to host target binding sites on VGAM86 host target RNA, herein designated VGAM HOST TARGET RNA, such as BINDING SITE I, BINDING SITE II and BINDING SITE III, inhibits translation of VGAM86 host target RNA, herein designated VGAM HOST TARGET RNA, into VGAM86 host target protein, herein designated VGAM HOST TARGET PROTEIN. VGAM host target protein is therefore outlined by a broken line.

[1166] It is appreciated that VGAM86 host target gene, herein designated VGAM HOST TARGET GENE, in fact represents a plurality of VGAM86 host target genes. The mRNA of each one of this plurality of VGAM86 host target genes comprises one or more host target binding sites, each having a nucleotide sequence which is at least partly complementary to VGAM86 RNA, herein designated VGAM RNA, and which when bound by VGAM86 RNA, herein designated VGAM RNA, causes inhibition of translation of respective one or more VGAM86 host target proteins.

[1167] It is further appreciated by one skilled in the art that the mode of translational inhibition illustrated by FIG. 1 with specific reference to translational inhibition exerted by VGAM86 gene, herein designated VGAM GENE, on one or more VGAM86 host target gene, herein designated VGAM HOST TARGET GENE, is in fact common to other known non-viral miRNA genes. As mentioned hereinabove with reference to the background section, although a specific complementary binding site has been demonstrated only for some of the known miRNA genes (primarily Lin-4 and Let-7), all other recently discovered miRNA genes are also believed by those skilled in the art to modulate expression of other genes by complementary binding, although specific complementary binding sites of these other miRNA genes have not yet been found (Ruvkun G., Perspective: Glimpses of a tiny RNA world, Science 294, 779 (2001)).

[1168] It is yet further appreciated that a function of VGAM86 is inhibition of expression of host target genes, as part of a novel viral mechanism of attacking a host. Accordingly, utilities of VGAM86 include diagnosis, prevention and treatment of viral infection by Vaccinia virus. Specific functions, and accordingly utilities, of VGAM86 correlate with, and may be deduced from, the identity of the host target genes which VGAM86 binds and inhibits, and the function of these host target genes, as elaborated hereinbelow.

[1169] Nucleotide sequences of the VGAM86 precursor RNA, herein designated VGAM PRECURSOR RNA, and of the diced VGAM86 RNA, herein designated VGAM RNA, and a schematic representation of the secondary folding of VGAM86 folded precursor RNA, herein designated VGAM FOLDED PRECURSOR RNA, of VGAM86 are further described hereinbelow with reference to Table 1.

[1170] Nucleotide sequences of host target binding sites, such as BINDING SITE-I, BINDING SITE-II and BINDING SITE-III of FIG. 1, found on, and schematic representation of the complementarity of each of these host target binding sites to VGAM86 RNA, herein designated VGAM RNA, are described hereinbelow with reference to Table 2.

[1171] FIG. 1 further provides a conceptual description of another novel bioinformatically detected viral gene of the present invention, referred to here as Viral Genomic Address Messenger 87 (VGAM87) viral gene, which modulates expression of respective host target genes thereof, the function and utility of which host target genes is known in the art.

[1172] VGAM87 is a novel bioinformatically detected regulatory, non protein coding, viral micro RNA (miRNA) gene. The method by which VGAM87 was detected is described hereinabove with reference to FIGS. 2-8.

[1173] VGAM87 gene, herein designated VGAM GENE, is a viral gene contained in the genome of Vaccinia virus. VGAM87 host target gene, herein designated VGAM HOST TARGET GENE, is a human gene contained in the human genome.

[1174] VGAM87 gene, herein designated VGAM GENE, encodes a VGAM87 precursor RNA, herein designated VGAM PRECURSOR RNA. Similar to other miRNA genes, and unlike most ordinary genes, VGAM87 precursor RNA, herein designated VGAM PRECURSOR RNA, does not encode a protein. A nucleotide sequence identical or highly similar to the nucleotide sequence of VGAM87 precursor RNA is designated SEQ ID:73, and is provided hereinbelow with reference to the sequence listing part. Nucleotide sequence SEQ ID:73 is located at position 28644 relative to the genome of Vaccinia virus.

[1175] VGAM87 precursor RNA, herein designated VGAM PRECURSOR RNA, folds onto itself, forming VGAM87 folded precursor RNA, herein designated VGAM FOLDED PRECURSOR RNA, which has a two-dimensional hairpin structure. As is well known in the art, this hairpin structure, is typical of RNA encoded by miRNA genes, and is due to the fact that the nucleotide sequence of the first half of the RNA encoded by a miRNA gene is an accurate or partial inversed-reversed sequence of the nucleotide sequence of the second half thereof.

[1176] An enzyme complex designated DICER COMPLEX, dices the VGAM87 folded precursor RNA, herein designated VGAM FOLDED PRECURSOR RNA, into VGAM87 RNA, herein designated VGAM RNA, a single stranded ˜22 nt long RNA segment. As is known in the art, dicing of a hairpin structured RNA precursor product into a short ˜22 nt RNA segment is catalyzed by an enzyme complex comprising an enzyme called Dicer together with other necessary proteins. A probable (over 72%) nucleotide sequence of VGAM87 RNA is designated SEQ ID:422, and is provided hereinbelow with reference to the sequence listing part.

[1177] VGAM87 host target gene, herein designated VGAM HOST TARGET GENE, encodes a corresponding messenger RNA, VGAM87 host target RNA, herein designated VGAM HOST TARGET RNA. VGAM87 host target RNA, herein designated VGAM HOST TARGET RNA, comprises three regions, as is typical of mRNA of a protein coding gene: a 5 untranslated region, a protein coding region and a 3 untranslated region, designated 5UTR, PROTEIN CODING and 3UTR respectively.

[1178] VGAM87 RNA, herein designated VGAM RNA, binds complementarily to one or more host target binding sites located in untranslated regions of VGAM87 host target RNA, herein designated VGAM HOST TARGET RNA. This complementary binding is due to the fact that the nucleotide sequence of VGAM87 RNA, herein designated VGAM RNA, is an accurate or a partial inversed-reversed sequence of the nucleotide sequence of each of the host target binding sites. As an illustration, FIG. 1 shows 3 such host target binding sites, designated BINDING SITE I, BINDING SITE II and BINDING SITE III respectively. It is appreciated that the number of host target binding sites shown in FIG. 1 is meant as an illustration only, and is not meant to be limiting VGAM87 RNA, herein designated VGAM RNA, may have a different number of host target binding sites in untranslated regions of a VGAM87 host target RNA, herein designated VGAM HOST TARGET RNA. It is further appreciated that while FIG. 1 depicts host target binding sites in the 3UTR region, this is meant as an example only these host target binding sites may be located in the 3UTR region, the 5UTR region, or in both 3UTR and 5UTR regions.

[1179] The complementary binding of VGAM87 RNA, herein designated VGAM RNA, to host target binding sites on VGAM87 host target RNA, herein designated VGAM HOST TARGET RNA, such as BINDING SITE I, BINDING SITE II and BINDING SITE III, inhibits translation of VGAM87 host target RNA, herein designated VGAM HOST TARGET RNA, into VGAM87 host target protein, herein designated VGAM HOST TARGET PROTEIN. VGAM host target protein is therefore outlined by a broken line.

[1180] It is appreciated that VGAM87 host target gene, herein designated VGAM HOST TARGET GENE, in fact represents a plurality of VGAM87 host target genes. The mRNA of each one of this plurality of VGAM87 host target genes comprises one or more host target binding sites, each having a nucleotide sequence which is at least partly complementary to VGAM87 RNA, herein designated VGAM RNA, and which when bound by VGAM87 RNA, herein designated VGAM RNA, causes inhibition of translation of respective one or more VGAM87 host target proteins.

[1181] It is further appreciated by one skilled in the art that the mode of translational inhibition illustrated by FIG. 1 with specific reference to translational inhibition exerted by VGAM87 gene, herein designated VGAM GENE, on one or more VGAM87 host target gene, herein designated VGAM HOST TARGET GENE, is in fact common to other known non-viral miRNA genes. As mentioned hereinabove with reference to the background section, although a specific complementary binding site has been demonstrated only for some of the known miRNA genes (primarily Lin-4 and Let-7), all other recently discovered miRNA genes are also believed by those skilled in the art to modulate expression of other genes by complementary binding, although specific complementary binding sites of these other miRNA genes have not yet been found (Ruvkun G., Perspective: Glimpses of a tiny RNA world, Science 294, 779 (2001)).

[1182] It is yet further appreciated that a function of VGAM87 is inhibition of expression of host target genes, as part of a novel viral mechanism of attacking a host. Accordingly, utilities of VGAM87 include diagnosis, prevention and treatment of viral infection by Vaccinia virus. Specific functions, and accordingly utilities, of VGAM87 correlate with, and may be deduced from, the identity of the host target genes which VGAM87 binds and inhibits, and the function of these host target genes, as elaborated hereinbelow.

[1183] Nucleotide sequences of the VGAM87 precursor RNA, herein designated VGAM PRECURSOR RNA, and of the diced VGAM87 RNA, herein designated VGAM RNA, and a schematic representation of the secondary folding of VGAM87 folded precursor RNA, herein designated VGAM FOLDED PRECURSOR RNA, of VGAM87 are further described hereinbelow with reference to Table 1.

[1184] Nucleotide sequences of host target binding sites, such as BINDING SITE-I, BINDING SITE-II and BINDING SITE-III of FIG. 1, found on, and schematic representation of the complementarity of each of these host target binding sites to VGAM87 RNA, herein designated VGAM RNA, are described hereinbelow with reference to Table 2.

[1185] FIG. 1 further provides a conceptual description of another novel bioinformatically detected viral gene of the present invention, referred to here as Viral Genomic Address Messenger 88 (VGAM88) viral gene, which modulates expression of respective host target genes thereof, the function and utility of which host target genes is known in the art.

[1186] VGAM88 is a novel bioinformatically detected regulatory, non protein coding, viral micro RNA (miRNA) gene. The method by which VGAM88 was detected is described hereinabove with reference to FIGS. 2-8.

[1187] VGAM88 gene, herein designated VGAM GENE, is a viral gene contained in the genome of Vaccinia virus. VGAM88 host target gene, herein designated VGAM HOST TARGET GENE, is a human gene contained in the human genome.

[1188] VGAM88 gene, herein designated VGAM GENE, encodes a VGAM88 precursor RNA, herein designated VGAM PRECURSOR RNA. Similar to other miRNA genes, and unlike most ordinary genes, VGAM88 precursor RNA, herein designated VGAM PRECURSOR RNA, does not encode a protein. A nucleotide sequence identical or highly similar to the nucleotide sequence of VGAM88 precursor RNA is designated SEQ ID:74, and is provided hereinbelow with reference to the sequence listing part. Nucleotide sequence SEQ ID:74 is located at position 29293 relative to the genome of Vaccinia virus.

[1189] VGAM88 precursor RNA, herein designated VGAM PRECURSOR RNA, folds onto itself, forming VGAM88 folded precursor RNA, herein designated VGAM FOLDED PRECURSOR RNA, which has a two-dimensional hairpin structure. As is well known in the art, this hairpin structure, is typical of RNA encoded by miRNA genes, and is due to the fact that the nucleotide sequence of the first half of the RNA encoded by a miRNA gene is an accurate or partial inversed-reversed sequence of the nucleotide sequence of the second half thereof.

[1190] An enzyme complex designated DICER COMPLEX, dices the VGAM88 folded precursor RNA, herein designated VGAM FOLDED PRECURSOR RNA, into VGAM88 RNA, herein designated VGAM RNA, a single stranded ˜22 nt long RNA segment. As is known in the art, dicing of a hairpin structured RNA precursor product into a short ˜22 nt RNA segment is catalyzed by an enzyme complex comprising an enzyme called Dicer together with other necessary proteins. A probable (over 80%) nucleotide sequence of VGAM88 RNA is designated SEQ ID:423, and is provided hereinbelow with reference to the sequence listing part.

[1191] VGAM88 host target gene, herein designated VGAM HOST TARGET GENE, encodes a corresponding messenger RNA, VGAM88 host target RNA, herein designated VGAM HOST TARGET RNA. VGAM88 host target RNA, herein designated VGAM HOST TARGET RNA, comprises three regions, as is typical of mRNA of a protein coding gene: a 5 untranslated region, a protein coding region and a 3 untranslated region, designated 5UTR, PROTEIN CODING and 3UTR respectively.

[1192] VGAM88 RNA, herein designated VGAM RNA, binds complementarily to one or more host target binding sites located in untranslated regions of VGAM88 host target RNA, herein designated VGAM HOST TARGET RNA. This complementary binding is due to the fact that the nucleotide sequence of VGAM88 RNA, herein designated VGAM RNA, is an accurate or a partial inversed-reversed sequence of the nucleotide sequence of each of the host target binding sites. As an illustration, FIG. 1 shows 3 such host target binding sites, designated BINDING SITE I, BINDING SITE II and BINDING SITE III respectively. It is appreciated that the number of host target binding sites shown in FIG. 1 is meant as an illustration only, and is not meant to be limiting VGAM88 RNA, herein designated VGAM RNA, may have a different number of host target binding sites in untranslated regions of a VGAM88 host target RNA, herein designated VGAM HOST TARGET RNA. It is further appreciated that while FIG. 1 depicts host target binding sites in the 3UTR region, this is meant as an example only these host target binding sites may be located in the 3UTR region, the 5UTR region, or in both 3UTR and 5UTR regions.

[1193] The complementary binding of VGAM88 RNA, herein designated VGAM RNA, to host target binding sites on VGAM88 host target RNA, herein designated VGAM HOST TARGET RNA, such as BINDING SITE I, BINDING SITE II and BINDING SITE III, inhibits translation of VGAM88 host target RNA, herein designated VGAM HOST TARGET RNA, into VGAM88 host target protein, herein designated VGAM HOST TARGET PROTEIN. VGAM host target protein is therefore outlined by a broken line.

[1194] It is appreciated that VGAM88 host target gene, herein designated VGAM HOST TARGET GENE, in fact represents a plurality of VGAM88 host target genes. The mRNA of each one of this plurality of VGAM88 host target genes comprises one or more host target binding sites, each having a nucleotide sequence which is at least partly complementary to VGAM88 RNA, herein designated VGAM RNA, and which when bound by VGAM88 RNA, herein designated VGAM RNA, causes inhibition of translation of respective one or more VGAM88 host target proteins.

[1195] It is further appreciated by one skilled in the art that the mode of translational inhibition illustrated by FIG. 1 with specific reference to translational inhibition exerted by VGAM88 gene, herein designated VGAM GENE, on one or more VGAM88 host target gene, herein designated VGAM HOST TARGET GENE, is in fact common to other known non-viral miRNA genes. As mentioned hereinabove with reference to the background section, although a specific complementary binding site has been demonstrated only for some of the known miRNA genes (primarily Lin-4 and Let-7), all other recently discovered miRNA genes are also believed by those skilled in the art to modulate expression of other genes by complementary binding, although specific complementary binding sites of these other miRNA genes have not yet been found (Ruvkun G., Perspective: Glimpses of a tiny RNA world, Science 294, 779 (2001)).

[1196] It is yet further appreciated that a function of VGAM88 is inhibition of expression of host target genes, as part of a novel viral mechanism of attacking a host. Accordingly, utilities of VGAM88 include diagnosis, prevention and treatment of viral infection by Vaccinia virus. Specific functions, and accordingly utilities, of VGAM88 correlate with, and may be deduced from, the identity of the host target genes which VGAM88 binds and inhibits, and the function of these host target genes, as elaborated hereinbelow.

[1197] Nucleotide sequences of the VGAM88 precursor RNA, herein designated VGAM PRECURSOR RNA, and of the diced VGAM88 RNA, herein designated VGAM RNA, and a schematic representation of the secondary folding of VGAM88 folded precursor RNA, herein designated VGAM FOLDED PRECURSOR RNA, of VGAM88 are further described hereinbelow with reference to Table 1.

[1198] Nucleotide sequences of host target binding sites, such as BINDING SITE-I, BINDING SITE-II and BINDING SITE-III of FIG. 1, found on, and schematic representation of the complementarity of each of these host target binding sites to VGAM88 RNA, herein designated VGAM RNA, are described hereinbelow with reference to Table 2.

[1199] FIG. 1 further provides a conceptual description of another novel bioinformatically detected viral gene of the present invention, referred to here as Viral Genomic Address Messenger 89 (VGAM89) viral gene, which modulates expression of respective host target genes thereof, the function and utility of which host target genes is known in the art.

[1200] VGAM89 is a novel bioinformatically detected regulatory, non protein coding, viral micro RNA (miRNA) gene. The method by which VGAM89 was detected is described hereinabove with reference to FIGS. 2-8.

[1201] VGAM89 gene, herein designated VGAM GENE, is a viral gene contained in the genome of Vaccinia virus. VGAM89 host target gene, herein designated VGAM HOST TARGET GENE, is a human gene contained in the human genome.

[1202] VGAM89 gene, herein designated VGAM GENE, encodes a VGAM89 precursor RNA, herein designated VGAM PRECURSOR RNA. Similar to other miRNA genes, and unlike most ordinary genes, VGAM89 precursor RNA, herein designated VGAM PRECURSOR RNA, does not encode a protein. A nucleotide sequence identical or highly similar to the nucleotide sequence of VGAM89 precursor RNA is designated SEQ ID:75, and is provided hereinbelow with reference to the sequence listing part. Nucleotide sequence SEQ ID:75 is located at position 25248 relative to the genome of Vaccinia virus.

[1203] VGAM89 precursor RNA, herein designated VGAM PRECURSOR RNA, folds onto itself, forming VGAM89 folded precursor RNA, herein designated VGAM FOLDED PRECURSOR RNA, which has a two-dimensional hairpin structure. As is well known in the art, this hairpin structure, is typical of RNA encoded by miRNA genes, and is due to the fact that the nucleotide sequence of the first half of the RNA encoded by a miRNA gene is an accurate or partial inversed-reversed sequence of the nucleotide sequence of the second half thereof.

[1204] An enzyme complex designated DICER COMPLEX, dices the VGAM89 folded precursor RNA, herein designated VGAM FOLDED PRECURSOR RNA, into VGAM89 RNA, herein designated VGAM RNA, a single stranded ˜22 nt long RNA segment. As is known in the art, dicing of a hairpin structured RNA precursor product into a short ˜22 nt RNA segment is catalyzed by an enzyme complex comprising an enzyme called Dicer together with other necessary proteins. A probable (over 80%) nucleotide sequence of VGAM89 RNA is designated SEQ ID:424, and is provided hereinbelow with reference to the sequence listing part.

[1205] VGAM89 host target gene, herein designated VGAM HOST TARGET GENE, encodes a corresponding messenger RNA, VGAM89 host target RNA, herein designated VGAM HOST TARGET RNA. VGAM89 host target RNA, herein designated VGAM HOST TARGET RNA, comprises three regions, as is typical of mRNA of a protein coding gene: a 5 untranslated region, a protein coding region and a 3 untranslated region, designated 5UTR, PROTEIN CODING and 3UTR respectively.

[1206] VGAM89 RNA, herein designated VGAM RNA, binds complementarily to one or more host target binding sites located in untranslated regions of VGAM89 host target RNA, herein designated VGAM HOST TARGET RNA. This complementary binding is due to the fact that the nucleotide sequence of VGAM89 RNA, herein designated VGAM RNA, is an accurate or a partial inversed-reversed sequence of the nucleotide sequence of each of the host target binding sites. As an illustration, FIG. 1 shows 3 such host target binding sites, designated BINDING SITE I, BINDING SITE II and BINDING SITE III respectively. It is appreciated that the number of host target binding sites shown in FIG. 1 is meant as an illustration only, and is not meant to be limiting VGAM89 RNA, herein designated VGAM RNA, may have a different number of host target binding sites in untranslated regions of a VGAM89 host target RNA, herein designated VGAM HOST TARGET RNA. It is further appreciated that while FIG. 1 depicts host target binding sites in the 3UTR region, this is meant as an example only these host target binding sites may be located in the 3UTR region, the 5UTR region, or in both 3UTR and 5UTR regions.

[1207] The complementary binding of VGAM89 RNA, herein designated VGAM RNA, to host target binding sites on VGAM89 host target RNA, herein designated VGAM HOST TARGET RNA, such as BINDING SITE I, BINDING SITE II and BINDING SITE III, inhibits translation of VGAM89 host target RNA, herein designated VGAM HOST TARGET RNA, into VGAM89 host target protein, herein designated VGAM HOST TARGET PROTEIN. VGAM host target protein is therefore outlined by a broken line.

[1208] It is appreciated that VGAM89 host target gene, herein designated VGAM HOST TARGET GENE, in fact represents a plurality of VGAM89 host target genes. The mRNA of each one of this plurality of VGAM89 host target genes comprises one or more host target binding sites, each having a nucleotide sequence which is at least partly complementary to VGAM89 RNA, herein designated VGAM RNA, and which when bound by VGAM89 RNA, herein designated VGAM RNA, causes inhibition of translation of respective one or more VGAM89 host target proteins.

[1209] It is further appreciated by one skilled in the art that the mode of translational inhibition illustrated by FIG. 1 with specific reference to translational inhibition exerted by VGAM89 gene, herein designated VGAM GENE, on one or more VGAM89 host target gene, herein designated VGAM HOST TARGET GENE, is in fact common to other known non-viral miRNA genes. As mentioned hereinabove with reference to the background section, although a specific complementary binding site has been demonstrated only for some of the known miRNA genes (primarily Lin-4 and Let-7), all other recently discovered miRNA genes are also believed by those skilled in the art to modulate expression of other genes by complementary binding, although specific complementary binding sites of these other miRNA genes have not yet been found (Ruvkun G., Perspective: Glimpses of a tiny RNA world, Science 294, 779 (2001)).

[1210] It is yet further appreciated that a function of VGAM89 is inhibition of expression of host target genes, as part of a novel viral mechanism of attacking a host. Accordingly, utilities of VGAM89 include diagnosis, prevention and treatment of viral infection by Vaccinia virus. Specific functions, and accordingly utilities, of VGAM89 correlate with, and may be deduced from, the identity of the host target genes which VGAM89 binds and inhibits, and the function of these host target genes, as elaborated hereinbelow.

[1211] Nucleotide sequences of the VGAM89 precursor RNA, herein designated VGAM PRECURSOR RNA, and of the diced VGAM89 RNA, herein designated VGAM RNA, and a schematic representation of the secondary folding of VGAM89 folded precursor RNA, herein designated VGAM FOLDED PRECURSOR RNA, of VGAM89 are further described hereinbelow with reference to Table 1.

[1212] Nucleotide sequences of host target binding sites, such as BINDING SITE-I, BINDING SITE-II and BINDING SITE-III of FIG. 1, found on, and schematic representation of the complementarity of each of these host target binding sites to VGAM89 RNA, herein designated VGAM RNA, are described hereinbelow with reference to Table 2.

[1213] FIG. 1 further provides a conceptual description of another novel bioinformatically detected viral gene of the present invention, referred to here as Viral Genomic Address Messenger 90 (VGAM90) viral gene, which modulates expression of respective host target genes thereof, the function and utility of which host target genes is known in the art.

[1214] VGAM90 is a novel bioinformatically detected regulatory, non protein coding, viral micro RNA (miRNA) gene. The method by which VGAM90 was detected is described hereinabove with reference to FIGS. 2-8.

[1215] VGAM90 gene, herein designated VGAM GENE, is a viral gene contained in the genome of Vaccinia virus. VGAM90 host target gene, herein designated VGAM HOST TARGET GENE, is a human gene contained in the human genome.

[1216] VGAM90 gene, herein designated VGAM GENE, encodes a VGAM90 precursor RNA, herein designated VGAM PRECURSOR RNA. Similar to other miRNA genes, and unlike most ordinary genes, VGAM90 precursor RNA, herein designated VGAM PRECURSOR RNA, does not encode a protein. A nucleotide sequence identical or highly similar to the nucleotide sequence of VGAM90 precursor RNA is designated SEQ ID:76, and is provided hereinbelow with reference to the sequence listing part. Nucleotide sequence SEQ ID:76 is located at position 29027 relative to the genome of Vaccinia virus.

[1217] VGAM90 precursor RNA, herein designated VGAM PRECURSOR RNA, folds onto itself, forming VGAM90 folded precursor RNA, herein designated VGAM FOLDED PRECURSOR RNA, which has a two-dimensional hairpin structure. As is well known in the art, this hairpin structure, is typical of RNA encoded by miRNA genes, and is due to the fact that the nucleotide sequence of the first half of the RNA encoded by a miRNA gene is an accurate or partial inversed-reversed sequence of the nucleotide sequence of the second half thereof.

[1218] An enzyme complex designated DICER COMPLEX, dices the VGAM90 folded precursor RNA, herein designated VGAM FOLDED PRECURSOR RNA, into VGAM90 RNA, herein designated VGAM RNA, a single stranded ˜22 nt long RNA segment. As is known in the art, dicing of a hairpin structured RNA precursor product into a short ˜22 nt RNA segment is catalyzed by an enzyme complex comprising an enzyme called Dicer together with other necessary proteins. A probable (over 76%) nucleotide sequence of VGAM90 RNA is designated SEQ ID:425, and is provided hereinbelow with reference to the sequence listing part.

[1219] VGAM90 host target gene, herein designated VGAM HOST TARGET GENE, encodes a corresponding messenger RNA, VGAM90 host target RNA, herein designated VGAM HOST TARGET RNA. VGAM90 host target RNA, herein designated VGAM HOST TARGET RNA, comprises three regions, as is typical of mRNA of a protein coding gene: a 5 untranslated region, a protein coding region and a 3 untranslated region, designated 5UTR, PROTEIN CODING and 3UTR respectively.

[1220] VGAM90 RNA, herein designated VGAM RNA, binds complementarily to one or more host target binding sites located in untranslated regions of VGAM90 host target RNA, herein designated VGAM HOST TARGET RNA. This complementary binding is due to the fact that the nucleotide sequence of VGAM90 RNA, herein designated VGAM RNA, is an accurate or a partial inversed-reversed sequence of the nucleotide sequence of each of the host target binding sites. As an illustration, FIG. 1 shows 3 such host target binding sites, designated BINDING SITE I, BINDING SITE II and BINDING SITE III respectively. It is appreciated that the number of host target binding sites shown in FIG. 1 is meant as an illustration only, and is not meant to be limiting VGAM90 RNA, herein designated VGAM RNA, may have a different number of host target binding sites in untranslated regions of a VGAM90 host target RNA, herein designated VGAM HOST TARGET RNA. It is further appreciated that while FIG. 1 depicts host target binding sites in the 3UTR region, this is meant as an example only these host target binding sites may be located in the 3UTR region, the 5UTR region, or in both 3UTR and 5UTR regions.

[1221] The complementary binding of VGAM90 RNA, herein designated VGAM RNA, to host target binding sites on VGAM90 host target RNA, herein designated VGAM HOST TARGET RNA, such as BINDING SITE I, BINDING SITE II and BINDING SITE III, inhibits translation of VGAM90 host target RNA, herein designated VGAM HOST TARGET RNA, into VGAM90 host target protein, herein designated VGAM HOST TARGET PROTEIN. VGAM host target protein is therefore outlined by a broken line.

[1222] It is appreciated that VGAM90 host target gene, herein designated VGAM HOST TARGET GENE, in fact represents a plurality of VGAM90 host target genes. The mRNA of each one of this plurality of VGAM90 host target genes comprises one or more host target binding sites, each having a nucleotide sequence which is at least partly complementary to VGAM90 RNA, herein designated VGAM RNA, and which when bound by VGAM90 RNA, herein designated VGAM RNA, causes inhibition of translation of respective one or more VGAM90 host target proteins.

[1223] It is further appreciated by one skilled in the art that the mode of translational inhibition illustrated by FIG. 1 with specific reference to translational inhibition exerted by VGAM90 gene, herein designated VGAM GENE, on one or more VGAM90 host target gene, herein designated VGAM HOST TARGET GENE, is in fact common to other known non-viral miRNA genes. As mentioned hereinabove with reference to the background section, although a specific complementary binding site has been demonstrated only for some of the known miRNA genes (primarily Lin-4 and Let-7), all other recently discovered miRNA genes are also believed by those skilled in the art to modulate expression of other genes by complementary binding, although specific complementary binding sites of these other miRNA genes have not yet been found (Ruvkun G., Perspective: Glimpses of a tiny RNA world, Science 294, 779 (2001)).

[1224] It is yet further appreciated that a function of VGAM90 is inhibition of expression of host target genes, as part of a novel viral mechanism of attacking a host. Accordingly, utilities of VGAM90 include diagnosis, prevention and treatment of viral infection by Vaccinia virus. Specific functions, and accordingly utilities, of VGAM90 correlate with, and may be deduced from, the identity of the host target genes which VGAM90 binds and inhibits, and the function of these host target genes, as elaborated hereinbelow.

[1225] Nucleotide sequences of the VGAM90 precursor RNA, herein designated VGAM PRECURSOR RNA, and of the diced VGAM90 RNA, herein designated VGAM RNA, and a schematic representation of the secondary folding of VGAM90 folded precursor RNA, herein designated VGAM FOLDED PRECURSOR RNA, of VGAM90 are further described hereinbelow with reference to Table 1.

[1226] Nucleotide sequences of host target binding sites, such as BINDING SITE-I, BINDING SITE-II and BINDING SITE-III of FIG. 1, found on, and schematic representation of the complementarity of each of these host target binding sites to VGAM90 RNA, herein designated VGAM RNA, are described hereinbelow with reference to Table 2.

[1227] FIG. 1 further provides a conceptual description of another novel bioinformatically detected viral gene of the present invention, referred to here as Viral Genomic Address Messenger 91 (VGAM91) viral gene, which modulates expression of respective host target genes thereof, the function and utility of which host target genes is known in the art.

[1228] VGAM91 is a novel bioinformatically detected regulatory, non protein coding, viral micro RNA (miRNA) gene. The method by which VGAM91 was detected is described hereinabove with reference to FIGS. 2-8.

[1229] VGAM91 gene, herein designated VGAM GENE, is a viral gene contained in the genome of Vaccinia virus. VGAM91 host target gene, herein designated VGAM HOST TARGET GENE, is a human gene contained in the human genome.

[1230] VGAM91 gene, herein designated VGAM GENE, encodes a VGAM91 precursor RNA, herein designated VGAM PRECURSOR RNA. Similar to other miRNA genes, and unlike most ordinary genes, VGAM91 precursor RNA, herein designated VGAM PRECURSOR RNA, does not encode a protein. A nucleotide sequence identical or highly similar to the nucleotide sequence of VGAM91 precursor RNA is designated SEQ ID:77, and is provided hereinbelow with reference to the sequence listing part. Nucleotide sequence SEQ ID:77 is located at position 32319 relative to the genome of Vaccinia virus.

[1231] VGAM91 precursor RNA, herein designated VGAM PRECURSOR RNA, folds onto itself, forming VGAM91 folded precursor RNA, herein designated VGAM FOLDED PRECURSOR RNA, which has a two-dimensional hairpin structure. As is well known in the art, this hairpin structure, is typical of RNA encoded by miRNA genes, and is due to the fact that the nucleotide sequence of the first half of the RNA encoded by a miRNA gene is an accurate or partial inversed-reversed sequence of the nucleotide sequence of the second half thereof.

[1232] An enzyme complex designated DICER COMPLEX, dices the VGAM91 folded precursor RNA, herein designated VGAM FOLDED PRECURSOR RNA, into VGAM91 RNA, herein designated VGAM RNA, a single stranded ˜22 nt long RNA segment. As is known in the art, dicing of a hairpin structured RNA precursor product into a short ˜22 nt RNA segment is catalyzed by an enzyme complex comprising an enzyme called Dicer together with other necessary proteins. A probable (over 75%) nucleotide sequence of VGAM91 RNA is designated SEQ ID:426, and is provided hereinbelow with reference to the sequence listing part.

[1233] VGAM91 host target gene, herein designated VGAM HOST TARGET GENE, encodes a corresponding messenger RNA, VGAM91 host target RNA, herein designated VGAM HOST TARGET RNA. VGAM91 host target RNA, herein designated VGAM HOST TARGET RNA, comprises three regions, as is typical of mRNA of a protein coding gene: a 5 untranslated region, a protein coding region and a 3 untranslated region, designated 5UTR, PROTEIN CODING and 3UTR respectively.

[1234] VGAM91 RNA, herein designated VGAM RNA, binds complementarily to one or more host target binding sites located in untranslated regions of VGAM91 host target RNA, herein designated VGAM HOST TARGET RNA. This complementary binding is due to the fact that the nucleotide sequence of VGAM91 RNA, herein designated VGAM RNA, is an accurate or a partial inversed-reversed sequence of the nucleotide sequence of each of the host target binding sites. As an illustration, FIG. 1 shows 3 such host target binding sites, designated BINDING SITE I, BINDING SITE II and BINDING SITE III respectively. It is appreciated that the number of host target binding sites shown in FIG. 1 is meant as an illustration only, and is not meant to be limiting VGAM91 RNA, herein designated VGAM RNA, may have a different number of host target binding sites in untranslated regions of a VGAM91 host target RNA, herein designated VGAM HOST TARGET RNA. It is further appreciated that while FIG. 1 depicts host target binding sites in the 3UTR region, this is meant as an example only these host target binding sites may be located in the 3UTR region, the 5UTR region, or in both 3UTR and 5UTR regions.

[1235] The complementary binding of VGAM91 RNA, herein designated VGAM RNA, to host target binding sites on VGAM91 host target RNA, herein designated VGAM HOST TARGET RNA, such as BINDING SITE I, BINDING SITE II and BINDING SITE III, inhibits translation of VGAM91 host target RNA, herein designated VGAM HOST TARGET RNA, into VGAM91 host target protein, herein designated VGAM HOST TARGET PROTEIN. VGAM host target protein is therefore outlined by a broken line.

[1236] It is appreciated that VGAM91 host target gene, herein designated VGAM HOST TARGET GENE, in fact represents a plurality of VGAM91 host target genes. The mRNA of each one of this plurality of VGAM91 host target genes comprises one or more host target binding sites, each having a nucleotide sequence which is at least partly complementary to VGAM91 RNA, herein designated VGAM RNA, and which when bound by VGAM91 RNA, herein designated VGAM RNA, causes inhibition of translation of respective one or more VGAM91 host target proteins.

[1237] It is further appreciated by one skilled in the art that the mode of translational inhibition illustrated by FIG. 1 with specific reference to translational inhibition exerted by VGAM91 gene, herein designated VGAM GENE, on one or more VGAM91 host target gene, herein designated VGAM HOST TARGET GENE, is in fact common to other known non-viral miRNA genes. As mentioned hereinabove with reference to the background section, although a specific complementary binding site has been demonstrated only for some of the known miRNA genes (primarily Lin-4 and Let-7), all other recently discovered miRNA genes are also believed by those skilled in the art to modulate expression of other genes by complementary binding, although specific complementary binding sites of these other miRNA genes have not yet been found (Ruvkun G., Perspective: Glimpses of a tiny RNA world, Science 294, 779 (2001)).

[1238] It is yet further appreciated that a function of VGAM91 is inhibition of expression of host target genes, as part of a novel viral mechanism of attacking a host. Accordingly, utilities of VGAM91 include diagnosis, prevention and treatment of viral infection by Vaccinia virus. Specific functions, and accordingly utilities, of VGAM91 correlate with, and may be deduced from, the identity of the host target genes which VGAM91 binds and inhibits, and the function of these host target genes, as elaborated hereinbelow.

[1239] Nucleotide sequences of the VGAM91 precursor RNA, herein designated VGAM PRECURSOR RNA, and of the diced VGAM91 RNA, herein designated VGAM RNA, and a schematic representation of the secondary folding of VGAM91 folded precursor RNA, herein designated VGAM FOLDED PRECURSOR RNA, of VGAM91 are further described hereinbelow with reference to Table 1.

[1240] Nucleotide sequences of host target binding sites, such as BINDING SITE-I, BINDING SITE-II and BINDING SITE-III of FIG. 1, found on, and schematic representation of the complementarity of each of these host target binding sites to VGAM91 RNA, herein designated VGAM RNA, are described hereinbelow with reference to Table 2.

[1241] FIG. 1 further provides a conceptual description of another novel bioinformatically detected viral gene of the present invention, referred to here as Viral Genomic Address Messenger 92 (VGAM92) viral gene, which modulates expression of respective host target genes thereof, the function and utility of which host target genes is known in the art.

[1242] VGAM92 is a novel bioinformatically detected regulatory, non protein coding, viral micro RNA (miRNA) gene. The method by which VGAM92 was detected is described hereinabove with reference to FIGS. 2-8.

[1243] VGAM92 gene, herein designated VGAM GENE, is a viral gene contained in the genome of Vaccinia virus. VGAM92 host target gene, herein designated VGAM HOST TARGET GENE, is a human gene contained in the human genome.

[1244] VGAM92 gene, herein designated VGAM GENE, encodes a VGAM92 precursor RNA, herein designated VGAM PRECURSOR RNA. Similar to other miRNA genes, and unlike most ordinary genes, VGAM92 precursor RNA, herein designated VGAM PRECURSOR RNA, does not encode a protein. A nucleotide sequence identical or highly similar to the nucleotide sequence of VGAM92 precursor RNA is designated SEQ ID:78, and is provided hereinbelow with reference to the sequence listing part. Nucleotide sequence SEQ ID:78 is located at position 31579 relative to the genome of Vaccinia virus.

[1245] VGAM92 precursor RNA, herein designated VGAM PRECURSOR RNA, folds onto itself, forming VGAM92 folded precursor RNA, herein designated VGAM FOLDED PRECURSOR RNA, which has a two-dimensional hairpin structure. As is well known in the art, this hairpin structure, is typical of RNA encoded by miRNA genes, and is due to the fact that the nucleotide sequence of the first half of the RNA encoded by a miRNA gene is an accurate or partial inversed-reversed sequence of the nucleotide sequence of the second half thereof.

[1246] An enzyme complex designated DICER COMPLEX, dices the VGAM92 folded precursor RNA, herein designated VGAM FOLDED PRECURSOR RNA, into VGAM92 RNA, herein designated VGAM RNA, a single stranded ˜22 nt long RNA segment. As is known in the art, dicing of a hairpin structured RNA precursor product into a short ˜22 nt RNA segment is catalyzed by an enzyme complex comprising an enzyme called Dicer together with other necessary proteins. A probable (over 76%) nucleotide sequence of VGAM92 RNA is designated SEQ ID:427, and is provided hereinbelow with reference to the sequence listing part.

[1247] VGAM92 host target gene, herein designated VGAM HOST TARGET GENE, encodes a corresponding messenger RNA, VGAM92 host target RNA, herein designated VGAM HOST TARGET RNA. VGAM92 host target RNA, herein designated VGAM HOST TARGET RNA, comprises three regions, as is typical of mRNA of a protein coding gene: a 5 untranslated region, a protein coding region and a 3 untranslated region, designated 5UTR, PROTEIN CODING and 3UTR respectively.

[1248] VGAM92 RNA, herein designated VGAM RNA, binds complementarily to one or more host target binding sites located in untranslated regions of VGAM92 host target RNA, herein designated VGAM HOST TARGET RNA. This complementary binding is due to the fact that the nucleotide sequence of VGAM92 RNA, herein designated VGAM RNA, is an accurate or a partial inversed-reversed sequence of the nucleotide sequence of each of the host target binding sites. As an illustration, FIG. 1 shows 3 such host target binding sites, designated BINDING SITE I, BINDING SITE II and BINDING SITE III respectively. It is appreciated that the number of host target binding sites shown in FIG. 1 is meant as an illustration only, and is not meant to be limiting VGAM92 RNA, herein designated VGAM RNA, may have a different number of host target binding sites in untranslated regions of a VGAM92 host target RNA, herein designated VGAM HOST TARGET RNA. It is further appreciated that while FIG. 1 depicts host target binding sites in the 3UTR region, this is meant as an example only these host target binding sites may be located in the 3UTR region, the 5UTR region, or in both 3UTR and 5UTR regions.

[1249] The complementary binding of VGAM92 RNA, herein designated VGAM RNA, to host target binding sites on VGAM92 host target RNA, herein designated VGAM HOST TARGET RNA, such as BINDING SITE I, BINDING SITE II and BINDING SITE III, inhibits translation of VGAM92 host target RNA, herein designated VGAM HOST TARGET RNA, into VGAM92 host target protein, herein designated VGAM HOST TARGET PROTEIN. VGAM host target protein is therefore outlined by a broken line.

[1250] It is appreciated that VGAM92 host target gene, herein designated VGAM HOST TARGET GENE, in fact represents a plurality of VGAM92 host target genes. The mRNA of each one of this plurality of VGAM92 host target genes comprises one or more host target binding sites, each having a nucleotide sequence which is at least partly complementary to VGAM92 RNA, herein designated VGAM RNA, and which when bound by VGAM92 RNA, herein designated VGAM RNA, causes inhibition of translation of respective one or more VGAM92 host target proteins.

[1251] It is further appreciated by one skilled in the art that the mode of translational inhibition illustrated by FIG. 1 with specific reference to translational inhibition exerted by VGAM92 gene, herein designated VGAM GENE, on one or more VGAM92 host target gene, herein designated VGAM HOST TARGET GENE, is in fact common to other known non-viral miRNA genes. As mentioned hereinabove with reference to the background section, although a specific complementary binding site has been demonstrated only for some of the known miRNA genes (primarily Lin-4 and Let-7), all other recently discovered miRNA genes are also believed by those skilled in the art to modulate expression of other genes by complementary binding, although specific complementary binding sites of these other miRNA genes have not yet been found (Ruvkun G., Perspective: Glimpses of a tiny RNA world, Science 294, 779 (2001)).

[1252] It is yet further appreciated that a function of VGAM92 is inhibition of expression of host target genes, as part of a novel viral mechanism of attacking a host. Accordingly, utilities of VGAM92 include diagnosis, prevention and treatment of viral infection by Vaccinia virus. Specific functions, and accordingly utilities, of VGAM92 correlate with, and may be deduced from, the identity of the host target genes which VGAM92 binds and inhibits, and the function of these host target genes, as elaborated hereinbelow.

[1253] Nucleotide sequences of the VGAM92 precursor RNA, herein designated VGAM PRECURSOR RNA, and of the diced VGAM92 RNA, herein designated VGAM RNA, and a schematic representation of the secondary folding of VGAM92 folded precursor RNA, herein designated VGAM FOLDED PRECURSOR RNA, of VGAM92 are further described hereinbelow with reference to Table 1.

[1254] Nucleotide sequences of host target binding sites, such as BINDING SITE-I, BINDING SITE-II and BINDING SITE-III of FIG. 1, found on, and schematic representation of the complementarity of each of these host target binding sites to VGAM92 RNA, herein designated VGAM RNA, are described hereinbelow with reference to Table 2.

[1255] FIG. 1 further provides a conceptual description of another novel bioinformatically detected viral gene of the present invention, referred to here as Viral Genomic Address Messenger 93 (VGAM93) viral gene, which modulates expression of respective host target genes thereof, the function and utility of which host target genes is known in the art.

[1256] VGAM93 is a novel bioinformatically detected regulatory, non protein coding, viral micro RNA (miRNA) gene. The method by which VGAM93 was detected is described hereinabove with reference to FIGS. 2-8.

[1257] VGAM93 gene, herein designated VGAM GENE, is a viral gene contained in the genome of Vaccinia virus. VGAM93 host target gene, herein designated VGAM HOST TARGET GENE, is a human gene contained in the human genome.

[1258] VGAM93 gene, herein designated VGAM GENE, encodes a VGAM93 precursor RNA, herein designated VGAM PRECURSOR RNA. Similar to other miRNA genes, and unlike most ordinary genes, VGAM93 precursor RNA, herein designated VGAM PRECURSOR RNA, does not encode a protein. A nucleotide sequence identical or highly similar to the nucleotide sequence of VGAM93 precursor RNA is designated SEQ ID:79, and is provided hereinbelow with reference to the sequence listing part. Nucleotide sequence SEQ ID:79 is located at position 32553 relative to the genome of Vaccinia virus.

[1259] VGAM93 precursor RNA, herein designated VGAM PRECURSOR RNA, folds onto itself, forming VGAM93 folded precursor RNA, herein designated VGAM FOLDED PRECURSOR RNA, which has a two-dimensional hairpin structure. As is well known in the art, this hairpin structure, is typical of RNA encoded by miRNA genes, and is due to the fact that the nucleotide sequence of the first half of the RNA encoded by a miRNA gene is an accurate or partial inversed-reversed sequence of the nucleotide sequence of the second half thereof.

[1260] An enzyme complex designated DICER COMPLEX, dices the VGAM93 folded precursor RNA, herein designated VGAM FOLDED PRECURSOR RNA, into VGAM93 RNA, herein designated VGAM RNA, a single stranded ˜22 nt long RNA segment. As is known in the art, dicing of a hairpin structured RNA precursor product into a short ˜22 nt RNA segment is catalyzed by an enzyme complex comprising an enzyme called Dicer together with other necessary proteins. A probable (over 89%) nucleotide sequence of VGAM93 RNA is designated SEQ ID:428, and is provided hereinbelow with reference to the sequence listing part.

[1261] VGAM93 host target gene, herein designated VGAM HOST TARGET GENE, encodes a corresponding messenger RNA, VGAM93 host target RNA, herein designated VGAM HOST TARGET RNA. VGAM93 host target RNA, herein designated VGAM HOST TARGET RNA, comprises three regions, as is typical of mRNA of a protein coding gene: a 5 untranslated region, a protein coding region and a 3 untranslated region, designated 5UTR, PROTEIN CODING and 3UTR respectively.

[1262] VGAM93 RNA, herein designated VGAM RNA, binds complementarily to one or more host target binding sites located in untranslated regions of VGAM93 host target RNA, herein designated VGAM HOST TARGET RNA. This complementary binding is due to the fact that the nucleotide sequence of VGAM93 RNA, herein designated VGAM RNA, is an accurate or a partial inversed-reversed sequence of the nucleotide sequence of each of the host target binding sites. As an illustration, FIG. 1 shows 3 such host target binding sites, designated BINDING SITE I, BINDING SITE II and BINDING SITE III respectively. It is appreciated that the number of host target binding sites shown in FIG. 1 is meant as an illustration only, and is not meant to be limiting VGAM93 RNA, herein designated VGAM RNA, may have a different number of host target binding sites in untranslated regions of a VGAM93 host target RNA, herein designated VGAM HOST TARGET RNA. It is further appreciated that while FIG. 1 depicts host target binding sites in the 3UTR region, this is meant as an example only these host target binding sites may be located in the 3UTR region, the 5UTR region, or in both 3UTR and 5UTR regions.

[1263] The complementary binding of VGAM93 RNA, herein designated VGAM RNA, to host target binding sites on VGAM93 host target RNA, herein designated VGAM HOST TARGET RNA, such as BINDING SITE I, BINDING SITE II and BINDING SITE III, inhibits translation of VGAM93 host target RNA, herein designated VGAM HOST TARGET RNA, into VGAM93 host target protein, herein designated VGAM HOST TARGET PROTEIN. VGAM host target protein is therefore outlined by a broken line.

[1264] It is appreciated that VGAM93 host target gene, herein designated VGAM HOST TARGET GENE, in fact represents a plurality of VGAM93 host target genes. The mRNA of each one of this plurality of VGAM93 host target genes comprises one or more host target binding sites, each having a nucleotide sequence which is at least partly complementary to VGAM93 RNA, herein designated VGAM RNA, and which when bound by VGAM93 RNA, herein designated VGAM RNA, causes inhibition of translation of respective one or more VGAM93 host target proteins.

[1265] It is further appreciated by one skilled in the art that the mode of translational inhibition illustrated by FIG. 1 with specific reference to translational inhibition exerted by VGAM93 gene, herein designated VGAM GENE, on one or more VGAM93 host target gene, herein designated VGAM HOST TARGET GENE, is in fact common to other known non-viral miRNA genes. As mentioned hereinabove with reference to the background section, although a specific complementary binding site has been demonstrated only for some of the known miRNA genes (primarily Lin-4 and Let-7), all other recently discovered miRNA genes are also believed by those skilled in the art to modulate expression of other genes by complementary binding, although specific complementary binding sites of these other miRNA genes have not yet been found (Ruvkun G., Perspective: Glimpses of a tiny RNA world, Science 294, 779 (2001)).

[1266] It is yet further appreciated that a function of VGAM93 is inhibition of expression of host target genes, as part of a novel viral mechanism of attacking a host. Accordingly, utilities of VGAM93 include diagnosis, prevention and treatment of viral infection by Vaccinia virus. Specific functions, and accordingly utilities, of VGAM93 correlate with, and may be deduced from, the identity of the host target genes which VGAM93 binds and inhibits, and the function of these host target genes, as elaborated hereinbelow.

[1267] Nucleotide sequences of the VGAM93 precursor RNA, herein designated VGAM PRECURSOR RNA, and of the diced VGAM93 RNA, herein designated VGAM RNA, and a schematic representation of the secondary folding of VGAM93 folded precursor RNA, herein designated VGAM FOLDED PRECURSOR RNA, of VGAM93 are further described hereinbelow with reference to Table 1.

[1268] Nucleotide sequences of host target binding sites, such as BINDING SITE-I, BINDING SITE-II and BINDING SITE-III of FIG. 1, found on, and schematic representation of the complementarity of each of these host target binding sites to VGAM93 RNA, herein designated VGAM RNA, are described hereinbelow with reference to Table 2.

[1269] FIG. 1 further provides a conceptual description of another novel bioinformatically detected viral gene of the present invention, referred to here as Viral Genomic Address Messenger 94 (VGAM94) viral gene, which modulates expression of respective host target genes thereof, the function and utility of which host target genes is known in the art.

[1270] VGAM94 is a novel bioinformatically detected regulatory, non protein coding, viral micro RNA (miRNA) gene. The method by which VGAM94 was detected is described hereinabove with reference to FIGS. 2-8.

[1271] VGAM94 gene, herein designated VGAM GENE, is a viral gene contained in the genome of Vaccinia virus. VGAM94 host target gene, herein designated VGAM HOST TARGET GENE, is a human gene contained in the human genome.

[1272] VGAM94 gene, herein designated VGAM GENE, encodes a VGAM94 precursor RNA, herein designated VGAM PRECURSOR RNA. Similar to other miRNA genes, and unlike most ordinary genes, VGAM94 precursor RNA, herein designated VGAM PRECURSOR RNA, does not encode a protein. A nucleotide sequence identical or highly similar to the nucleotide sequence of VGAM94 precursor RNA is designated SEQ ID:80, and is provided hereinbelow with reference to the sequence listing part. Nucleotide sequence SEQ ID:80 is located at position 32481 relative to the genome of Vaccinia virus.

[1273] VGAM94 precursor RNA, herein designated VGAM PRECURSOR RNA, folds onto itself, forming VGAM94 folded precursor RNA, herein designated VGAM FOLDED PRECURSOR RNA, which has a two-dimensional hairpin structure. As is well known in the art, this hairpin structure, is typical of RNA encoded by miRNA genes, and is due to the fact that the nucleotide sequence of the first half of the RNA encoded by a miRNA gene is an accurate or partial inversed-reversed sequence of the nucleotide sequence of the second half thereof.

[1274] An enzyme complex designated DICER COMPLEX, dices the VGAM94 folded precursor RNA, herein designated VGAM FOLDED PRECURSOR RNA, into VGAM94 RNA, herein designated VGAM RNA, a single stranded ˜22 nt long RNA segment. As is known in the art, dicing of a hairpin structured RNA precursor product into a short ˜22 nt RNA segment is catalyzed by an enzyme complex comprising an enzyme called Dicer together with other necessary proteins. A probable (over 80%) nucleotide sequence of VGAM94 RNA is designated SEQ ID:429, and is provided hereinbelow with reference to the sequence listing part.

[1275] VGAM94 host target gene, herein designated VGAM HOST TARGET GENE, encodes a corresponding messenger RNA, VGAM94 host target RNA, herein designated VGAM HOST TARGET RNA. VGAM94 host target RNA, herein designated VGAM HOST TARGET RNA, comprises three regions, as is typical of mRNA of a protein coding gene: a 5 untranslated region, a protein coding region and a 3 untranslated region, designated 5UTR, PROTEIN CODING and 3UTR respectively.

[1276] VGAM94 RNA, herein designated VGAM RNA, binds complementarily to one or more host target binding sites located in untranslated regions of VGAM94 host target RNA, herein designated VGAM HOST TARGET RNA. This complementary binding is due to the fact that the nucleotide sequence of VGAM94 RNA, herein designated VGAM RNA, is an accurate or a partial inversed-reversed sequence of the nucleotide sequence of each of the host target binding sites. As an illustration, FIG. 1 shows 3 such host target binding sites, designated BINDING SITE I, BINDING SITE II and BINDING SITE III respectively. It is appreciated that the number of host target binding sites shown in FIG. 1 is meant as an illustration only, and is not meant to be limiting VGAM94 RNA, herein designated VGAM RNA, may have a different number of host target binding sites in untranslated regions of a VGAM94 host target RNA, herein designated VGAM HOST TARGET RNA. It is further appreciated that while FIG. 1 depicts host target binding sites in the 3UTR region, this is meant as an example only these host target binding sites may be located in the 3UTR region, the 5UTR region, or in both 3UTR and 5UTR regions.

[1277] The complementary binding of VGAM94 RNA, herein designated VGAM RNA, to host target binding sites on VGAM94 host target RNA, herein designated VGAM HOST TARGET RNA, such as BINDING SITE I, BINDING SITE II and BINDING SITE III, inhibits translation of VGAM94 host target RNA, herein designated VGAM HOST TARGET RNA, into VGAM94 host target protein, herein designated VGAM HOST TARGET PROTEIN. VGAM host target protein is therefore outlined by a broken line.

[1278] It is appreciated that VGAM94 host target gene, herein designated VGAM HOST TARGET GENE, in fact represents a plurality of VGAM94 host target genes. The mRNA of each one of this plurality of VGAM94 host target genes comprises one or more host target binding sites, each having a nucleotide sequence which is at least partly complementary to VGAM94 RNA, herein designated VGAM RNA, and which when bound by VGAM94 RNA, herein designated VGAM RNA, causes inhibition of translation of respective one or more VGAM94 host target proteins.

[1279] It is further appreciated by one skilled in the art that the mode of translational inhibition illustrated by FIG. 1 with specific reference to translational inhibition exerted by VGAM94 gene, herein designated VGAM GENE, on one or more VGAM94 host target gene, herein designated VGAM HOST TARGET GENE, is in fact common to other known non-viral miRNA genes. As mentioned hereinabove with reference to the background section, although a specific complementary binding site has been demonstrated only for some of the known miRNA genes (primarily Lin-4 and Let-7), all other recently discovered miRNA genes are also believed by those skilled in the art to modulate expression of other genes by complementary binding, although specific complementary binding sites of these other miRNA genes have not yet been found (Ruvkun G., Perspective: Glimpses of a tiny RNA world, Science 294, 779 (2001)).

[1280] It is yet further appreciated that a function of VGAM94 is inhibition of expression of host target genes, as part of a novel viral mechanism of attacking a host. Accordingly, utilities of VGAM94 include diagnosis, prevention and treatment of viral infection by Vaccinia virus. Specific functions, and accordingly utilities, of VGAM94 correlate with, and may be deduced from, the identity of the host target genes which VGAM94 binds and inhibits, and the function of these host target genes, as elaborated hereinbelow.

[1281] Nucleotide sequences of the VGAM94 precursor RNA, herein designated VGAM PRECURSOR RNA, and of the diced VGAM94 RNA, herein designated VGAM RNA, and a schematic representation of the secondary folding of VGAM94 folded precursor RNA, herein designated VGAM FOLDED PRECURSOR RNA, of VGAM94 are further described hereinbelow with reference to Table 1.

[1282] Nucleotide sequences of host target binding sites, such as BINDING SITE-I, BINDING SITE-II and BINDING SITE-III of FIG. 1, found on, and schematic representation of the complementarity of each of these host target binding sites to VGAM94 RNA, herein designated VGAM RNA, are described hereinbelow with reference to Table 2.

[1283] FIG. 1 further provides a conceptual description of another novel bioinformatically detected viral gene of the present invention, referred to here as Viral Genomic Address Messenger 95 (VGAM95) viral gene, which modulates expression of respective host target genes thereof, the function and utility of which host target genes is known in the art.

[1284] VGAM95 is a novel bioinformatically detected regulatory, non protein coding, viral micro RNA (miRNA) gene. The method by which VGAM95 was detected is described hereinabove with reference to FIGS. 2-8.

[1285] VGAM95 gene, herein designated VGAM GENE, is a viral gene contained in the genome of Vaccinia virus. VGAM95 host target gene, herein designated VGAM HOST TARGET GENE, is a human gene contained in the human genome.

[1286] VGAM95 gene, herein designated VGAM GENE, encodes a VGAM95 precursor RNA, herein designated VGAM PRECURSOR RNA. Similar to other miRNA genes, and unlike most ordinary genes, VGAM95 precursor RNA, herein designated VGAM PRECURSOR RNA, does not encode a protein. A nucleotide sequence identical or highly similar to the nucleotide sequence of VGAM95 precursor RNA is designated SEQ ID:81, and is provided hereinbelow with reference to the sequence listing part. Nucleotide sequence SEQ ID:81 is located at position 31304 relative to the genome of Vaccinia virus.

[1287] VGAM95 precursor RNA, herein designated VGAM PRECURSOR RNA, folds onto itself, forming VGAM95 folded precursor RNA, herein designated VGAM FOLDED PRECURSOR RNA, which has a two-dimensional hairpin structure. As is well known in the art, this hairpin structure, is typical of RNA encoded by miRNA genes, and is due to the fact that the nucleotide sequence of the first half of the RNA encoded by a miRNA gene is an accurate or partial inversed-reversed sequence of the nucleotide sequence of the second half thereof.

[1288] An enzyme complex designated DICER COMPLEX, dices the VGAM95 folded precursor RNA, herein designated VGAM FOLDED PRECURSOR RNA, into VGAM95 RNA, herein designated VGAM RNA, a single stranded ˜22 nt long RNA segment. As is known in the art, dicing of a hairpin structured RNA precursor product into a short ˜22 nt RNA segment is catalyzed by an enzyme complex comprising an enzyme called Dicer together with other necessary proteins. A probable (over 75%) nucleotide sequence of VGAM95 RNA is designated SEQ ID:430, and is provided hereinbelow with reference to the sequence listing part.

[1289] VGAM95 host target gene, herein designated VGAM HOST TARGET GENE, encodes a corresponding messenger RNA, VGAM95 host target RNA, herein designated VGAM HOST TARGET RNA. VGAM95 host target RNA, herein designated VGAM HOST TARGET RNA, comprises three regions, as is typical of mRNA of a protein coding gene: a 5 untranslated region, a protein coding region and a 3 untranslated region, designated 5UTR, PROTEIN CODING and 3UTR respectively.

[1290] VGAM95 RNA, herein designated VGAM RNA, binds complementarily to one or more host target binding sites located in untranslated regions of VGAM95 host target RNA, herein designated VGAM HOST TARGET RNA. This complementary binding is due to the fact that the nucleotide sequence of VGAM95 RNA, herein designated VGAM RNA, is an accurate or a partial inversed-reversed sequence of the nucleotide sequence of each of the host target binding sites. As an illustration, FIG. 1 shows 3 such host target binding sites, designated BINDING SITE I, BINDING SITE II and BINDING SITE III respectively. It is appreciated that the number of host target binding sites shown in FIG. 1 is meant as an illustration only, and is not meant to be limiting VGAM95 RNA, herein designated VGAM RNA, may have a different number of host target binding sites in untranslated regions of a VGAM95 host target RNA, herein designated VGAM HOST TARGET RNA. It is further appreciated that while FIG. 1 depicts host target binding sites in the 3UTR region, this is meant as an example only these host target binding sites may be located in the 3UTR region, the 5UTR region, or in both 3UTR and 5UTR regions.

[1291] The complementary binding of VGAM95 RNA, herein designated VGAM RNA, to host target binding sites on VGAM95 host target RNA, herein designated VGAM HOST TARGET RNA, such as BINDING SITE I, BINDING SITE II and BINDING SITE III, inhibits translation of VGAM95 host target RNA, herein designated VGAM HOST TARGET RNA, into VGAM95 host target protein, herein designated VGAM HOST TARGET PROTEIN. VGAM host target protein is therefore outlined by a broken line.

[1292] It is appreciated that VGAM95 host target gene, herein designated VGAM HOST TARGET GENE, in fact represents a plurality of VGAM95 host target genes. The mRNA of each one of this plurality of VGAM95 host target genes comprises one or more host target binding sites, each having a nucleotide sequence which is at least partly complementary to VGAM95 RNA, herein designated VGAM RNA, and which when bound by VGAM95 RNA, herein designated VGAM RNA, causes inhibition of translation of respective one or more VGAM95 host target proteins.

[1293] It is further appreciated by one skilled in the art that the mode of translational inhibition illustrated by FIG. 1 with specific reference to translational inhibition exerted by VGAM95 gene, herein designated VGAM GENE, on one or more VGAM95 host target gene, herein designated VGAM HOST TARGET GENE, is in fact common to other known non-viral miRNA genes. As mentioned hereinabove with reference to the background section, although a specific complementary binding site has been demonstrated only for some of the known miRNA genes (primarily Lin-4 and Let-7), all other recently discovered miRNA genes are also believed by those skilled in the art to modulate expression of other genes by complementary binding, although specific complementary binding sites of these other miRNA genes have not yet been found (Ruvkun G., Perspective: Glimpses of a tiny RNA world, Science 294, 779 (2001)).

[1294] It is yet further appreciated that a function of VGAM95 is inhibition of expression of host target genes, as part of a novel viral mechanism of attacking a host. Accordingly, utilities of VGAM95 include diagnosis, prevention and treatment of viral infection by Vaccinia virus. Specific functions, and accordingly utilities, of VGAM95 correlate with, and may be deduced from, the identity of the host target genes which VGAM95 binds and inhibits, and the function of these host target genes, as elaborated hereinbelow.

[1295] Nucleotide sequences of the VGAM95 precursor RNA, herein designated VGAM PRECURSOR RNA, and of the diced VGAM95 RNA, herein designated VGAM RNA, and a schematic representation of the secondary folding of VGAM95 folded precursor RNA, herein designated VGAM FOLDED PRECURSOR RNA, of VGAM95 are further described hereinbelow with reference to Table 1.

[1296] Nucleotide sequences of host target binding sites, such as BINDING SITE-I, BINDING SITE-II and BINDING SITE-III of FIG. 1, found on, and schematic representation of the complementarity of each of these host target binding sites to VGAM95 RNA, herein designated VGAM RNA, are described hereinbelow with reference to Table 2.

[1297] FIG. 1 further provides a conceptual description of another novel bioinformatically detected viral gene of the present invention, referred to here as Viral Genomic Address Messenger 96 (VGAM96) viral gene, which modulates expression of respective host target genes thereof, the function and utility of which host target genes is known in the art.

[1298] VGAM96 is a novel bioinformatically detected regulatory, non protein coding, viral micro RNA (miRNA) gene. The method by which VGAM96 was detected is described hereinabove with reference to FIGS. 2-8.

[1299] VGAM96 gene, herein designated VGAM GENE, is a viral gene contained in the genome of Vaccinia virus. VGAM96 host target gene, herein designated VGAM HOST TARGET GENE, is a human gene contained in the human genome.

[1300] VGAM96 gene, herein designated VGAM GENE, encodes a VGAM96 precursor RNA, herein designated VGAM PRECURSOR RNA. Similar to other miRNA genes, and unlike most ordinary genes, VGAM96 precursor RNA, herein designated VGAM PRECURSOR RNA, does not encode a protein. A nucleotide sequence identical or highly similar to the nucleotide sequence of VGAM96 precursor RNA is designated SEQ ID:82, and is provided hereinbelow with reference to the sequence listing part. Nucleotide sequence SEQ ID:82 is located at position 30764 relative to the genome of Vaccinia virus.

[1301] VGAM96 precursor RNA, herein designated VGAM PRECURSOR RNA, folds onto itself, forming VGAM96 folded precursor RNA, herein designated VGAM FOLDED PRECURSOR RNA, which has a two-dimensional hairpin structure. As is well known in the art, this hairpin structure, is typical of RNA encoded by miRNA genes, and is due to the fact that the nucleotide sequence of the first half of the RNA encoded by a miRNA gene is an accurate or partial inversed-reversed sequence of the nucleotide sequence of the second half thereof.

[1302] An enzyme complex designated DICER COMPLEX, dices the VGAM96 folded precursor RNA, herein designated VGAM FOLDED PRECURSOR RNA, into VGAM96 RNA, herein designated VGAM RNA, a single stranded ˜22 nt long RNA segment. As is known in the art, dicing of a hairpin structured RNA precursor product into a short ˜22 nt RNA segment is catalyzed by an enzyme complex comprising an enzyme called Dicer together with other necessary proteins. A probable (over 90%) nucleotide sequence of VGAM96 RNA is designated SEQ ID:431, and is provided hereinbelow with reference to the sequence listing part.

[1303] VGAM96 host target gene, herein designated VGAM HOST TARGET GENE, encodes a corresponding messenger RNA, VGAM96 host target RNA, herein designated VGAM HOST TARGET RNA. VGAM96 host target RNA, herein designated VGAM HOST TARGET RNA, comprises three regions, as is typical of mRNA of a protein coding gene: a 5 untranslated region, a protein coding region and a 3 untranslated region, designated 5UTR, PROTEIN CODING and 3UTR respectively.

[1304] VGAM96 RNA, herein designated VGAM RNA, binds complementarily to one or more host target binding sites located in untranslated regions of VGAM96 host target RNA, herein designated VGAM HOST TARGET RNA. This complementary binding is due to the fact that the nucleotide sequence of VGAM96 RNA, herein designated VGAM RNA, is an accurate or a partial inversed-reversed sequence of the nucleotide sequence of each of the host target binding sites. As an illustration, FIG. 1 shows 3 such host target binding sites, designated BINDING SITE I, BINDING SITE II and BINDING SITE III respectively. It is appreciated that the number of host target binding sites shown in FIG. 1 is meant as an illustration only, and is not meant to be limiting VGAM96 RNA, herein designated VGAM RNA, may have a different number of host target binding sites in untranslated regions of a VGAM96 host target RNA, herein designated VGAM HOST TARGET RNA. It is further appreciated that while FIG. 1 depicts host target binding sites in the 3UTR region, this is meant as an example only these host target binding sites may be located in the 3UTR region, the 5UTR region, or in both 3UTR and 5UTR regions.

[1305] The complementary binding of VGAM96 RNA, herein designated VGAM RNA, to host target binding sites on VGAM96 host target RNA, herein designated VGAM HOST TARGET RNA, such as BINDING SITE I, BINDING SITE II and BINDING SITE III, inhibits translation of VGAM96 host target RNA, herein designated VGAM HOST TARGET RNA, into VGAM96 host target protein, herein designated VGAM HOST TARGET PROTEIN. VGAM host target protein is therefore outlined by a broken line.

[1306] It is appreciated that VGAM96 host target gene, herein designated VGAM HOST TARGET GENE, in fact represents a plurality of VGAM96 host target genes. The mRNA of each one of this plurality of VGAM96 host target genes comprises one or more host target binding sites, each having a nucleotide sequence which is at least partly complementary to VGAM96 RNA, herein designated VGAM RNA, and which when bound by VGAM96 RNA, herein designated VGAM RNA, causes inhibition of translation of respective one or more VGAM96 host target proteins.

[1307] It is further appreciated by one skilled in the art that the mode of translational inhibition illustrated by FIG. 1 with specific reference to translational inhibition exerted by VGAM96 gene, herein designated VGAM GENE, on one or more VGAM96 host target gene, herein designated VGAM HOST TARGET GENE, is in fact common to other known non-viral miRNA genes. As mentioned hereinabove with reference to the background section, although a specific complementary binding site has been demonstrated only for some of the known miRNA genes (primarily Lin-4 and Let-7), all other recently discovered miRNA genes are also believed by those skilled in the art to modulate expression of other genes by complementary binding, although specific complementary binding sites of these other miRNA genes have not yet been found (Ruvkun G., Perspective: Glimpses of a tiny RNA world, Science 294, 779 (2001)).

[1308] It is yet further appreciated that a function of VGAM96 is inhibition of expression of host target genes, as part of a novel viral mechanism of attacking a host. Accordingly, utilities of VGAM96 include diagnosis, prevention and treatment of viral infection by Vaccinia virus. Specific functions, and accordingly utilities, of VGAM96 correlate with, and may be deduced from, the identity of the host target genes which VGAM96 binds and inhibits, and the function of these host target genes, as elaborated hereinbelow.

[1309] Nucleotide sequences of the VGAM96 precursor RNA, herein designated VGAM PRECURSOR RNA, and of the diced VGAM96 RNA, herein designated VGAM RNA, and a schematic representation of the secondary folding of VGAM96 folded precursor RNA, herein designated VGAM FOLDED PRECURSOR RNA, of VGAM96 are further described hereinbelow with reference to Table 1.

[1310] Nucleotide sequences of host target binding sites, such as BINDING SITE-I, BINDING SITE-II and BINDING SITE-III of FIG. 1, found on, and schematic representation of the complementarity of each of these host target binding sites to VGAM96 RNA, herein designated VGAM RNA, are described hereinbelow with reference to Table 2.

[1311] FIG. 1 further provides a conceptual description of another novel bioinformatically detected viral gene of the present invention, referred to here as Viral Genomic Address Messenger 97 (VGAM97) viral gene, which modulates expression of respective host target genes thereof, the function and utility of which host target genes is known in the art.

[1312] VGAM97 is a novel bioinformatically detected regulatory, non protein coding, viral micro RNA (miRNA) gene. The method by which VGAM97 was detected is described hereinabove with reference to FIGS. 2-8.

[1313] VGAM97 gene, herein designated VGAM GENE, is a viral gene contained in the genome of Vaccinia virus. VGAM97 host target gene, herein designated VGAM HOST TARGET GENE, is a human gene contained in the human genome.

[1314] VGAM97 gene, herein designated VGAM GENE, encodes a VGAM97 precursor RNA, herein designated VGAM PRECURSOR RNA. Similar to other miRNA genes, and unlike most ordinary genes, VGAM97 precursor RNA, herein designated VGAM PRECURSOR RNA, does not encode a protein. A nucleotide sequence identical or highly similar to the nucleotide sequence of VGAM97 precursor RNA is designated SEQ ID:83, and is provided hereinbelow with reference to the sequence listing part. Nucleotide sequence SEQ ID:83 is located at position 31794 relative to the genome of Vaccinia virus.

[1315] VGAM97 precursor RNA, herein designated VGAM PRECURSOR RNA, folds onto itself, forming VGAM97 folded precursor RNA, herein designated VGAM FOLDED PRECURSOR RNA, which has a two-dimensional hairpin structure. As is well known in the art, this hairpin structure, is typical of RNA encoded by miRNA genes, and is due to the fact that the nucleotide sequence of the first half of the RNA encoded by a miRNA gene is an accurate or partial inversed-reversed sequence of the nucleotide sequence of the second half thereof.

[1316] An enzyme complex designated DICER COMPLEX, dices the VGAM97 folded precursor RNA, herein designated VGAM FOLDED PRECURSOR RNA, into VGAM97 RNA, herein designated VGAM RNA, a single stranded ˜22 nt long RNA segment. As is known in the art, dicing of a hairpin structured RNA precursor product into a short ˜22 nt RNA segment is catalyzed by an enzyme complex comprising an enzyme called Dicer together with other necessary proteins. A probable (over 73%) nucleotide sequence of VGAM97 RNA is designated SEQ ID:432, and is provided hereinbelow with reference to the sequence listing part.

[1317] VGAM97 host target gene, herein designated VGAM HOST TARGET GENE, encodes a corresponding messenger RNA, VGAM97 host target RNA, herein designated VGAM HOST TARGET RNA. VGAM97 host target RNA, herein designated VGAM HOST TARGET RNA, comprises three regions, as is typical of mRNA of a protein coding gene: a 5 untranslated region, a protein coding region and a 3 untranslated region, designated 5UTR, PROTEIN CODING and 3UTR respectively.

[1318] VGAM97 RNA, herein designated VGAM RNA, binds complementarily to one or more host target binding sites located in untranslated regions of VGAM97 host target RNA, herein designated VGAM HOST TARGET RNA. This complementary binding is due to the fact that the nucleotide sequence of VGAM97 RNA, herein designated VGAM RNA, is an accurate or a partial inversed-reversed sequence of the nucleotide sequence of each of the host target binding sites. As an illustration, FIG. 1 shows 3 such host target binding sites, designated BINDING SITE I, BINDING SITE II and BINDING SITE III respectively. It is appreciated that the number of host target binding sites shown in FIG. 1 is meant as an illustration only, and is not meant to be limiting VGAM97 RNA, herein designated VGAM RNA, may have a different number of host target binding sites in untranslated regions of a VGAM97 host target RNA, herein designated VGAM HOST TARGET RNA. It is further appreciated that while FIG. 1 depicts host target binding sites in the 3UTR region, this is meant as an example only these host target binding sites may be located in the 3UTR region, the 5UTR region, or in both 3UTR and 5UTR regions.

[1319] The complementary binding of VGAM97 RNA, herein designated VGAM RNA, to host target binding sites on VGAM97 host target RNA, herein designated VGAM HOST TARGET RNA, such as BINDING SITE I, BINDING SITE II and BINDING SITE III, inhibits translation of VGAM97 host target RNA, herein designated VGAM HOST TARGET RNA, into VGAM97 host target protein, herein designated VGAM HOST TARGET PROTEIN. VGAM host target protein is therefore outlined by a broken line.

[1320] It is appreciated that VGAM97 host target gene, herein designated VGAM HOST TARGET GENE, in fact represents a plurality of VGAM97 host target genes. The mRNA of each one of this plurality of VGAM97 host target genes comprises one or more host target binding sites, each having a nucleotide sequence which is at least partly complementary to VGAM97 RNA, herein designated VGAM RNA, and which when bound by VGAM97 RNA, herein designated VGAM RNA, causes inhibition of translation of respective one or more VGAM97 host target proteins.

[1321] It is further appreciated by one skilled in the art that the mode of translational inhibition illustrated by FIG. 1 with specific reference to translational inhibition exerted by VGAM97 gene, herein designated VGAM GENE, on one or more VGAM97 host target gene, herein designated VGAM HOST TARGET GENE, is in fact common to other known non-viral miRNA genes. As mentioned hereinabove with reference to the background section, although a specific complementary binding site has been demonstrated only for some of the known miRNA genes (primarily Lin-4 and Let-7), all other recently discovered miRNA genes are also believed by those skilled in the art to modulate expression of other genes by complementary binding, although specific complementary binding sites of these other miRNA genes have not yet been found (Ruvkun G., Perspective: Glimpses of a tiny RNA world, Science 294, 779 (2001)).

[1322] It is yet further appreciated that a function of VGAM97 is inhibition of expression of host target genes, as part of a novel viral mechanism of attacking a host. Accordingly, utilities of VGAM97 include diagnosis, prevention and treatment of viral infection by Vaccinia virus. Specific functions, and accordingly utilities, of VGAM97 correlate with, and may be deduced from, the identity of the host target genes which VGAM97 binds and inhibits, and the function of these host target genes, as elaborated hereinbelow.

[1323] Nucleotide sequences of the VGAM97 precursor RNA, herein designated VGAM PRECURSOR RNA, and of the diced VGAM97 RNA, herein designated VGAM RNA, and a schematic representation of the secondary folding of VGAM97 folded precursor RNA, herein designated VGAM FOLDED PRECURSOR RNA, of VGAM97 are further described hereinbelow with reference to Table 1.

[1324] Nucleotide sequences of host target binding sites, such as BINDING SITE-I, BINDING SITE-II and BINDING SITE-III of FIG. 1, found on, and schematic representation of the complementarity of each of these host target binding sites to VGAM97 RNA, herein designated VGAM RNA, are described hereinbelow with reference to Table 2.

[1325] FIG. 1 further provides a conceptual description of another novel bioinformatically detected viral gene of the present invention, referred to here as Viral Genomic Address Messenger 98 (VGAM98) viral gene, which modulates expression of respective host target genes thereof, the function and utility of which host target genes is known in the art.

[1326] VGAM98 is a novel bioinformatically detected regulatory, non protein coding, viral micro RNA (miRNA) gene. The method by which VGAM98 was detected is described hereinabove with reference to FIGS. 2-8.

[1327] VGAM98 gene, herein designated VGAM GENE, is a viral gene contained in the genome of Vaccinia virus. VGAM98 host target gene, herein designated VGAM HOST TARGET GENE, is a human gene contained in the human genome.

[1328] VGAM98 gene, herein designated VGAM GENE, encodes a VGAM98 precursor RNA, herein designated VGAM PRECURSOR RNA. Similar to other miRNA genes, and unlike most ordinary genes, VGAM98 precursor RNA, herein designated VGAM PRECURSOR RNA, does not encode a protein. A nucleotide sequence identical or highly similar to the nucleotide sequence of VGAM98 precursor RNA is designated SEQ ID:84, and is provided hereinbelow with reference to the sequence listing part. Nucleotide sequence SEQ ID:84 is located at position 34330 relative to the genome of Vaccinia virus.

[1329] VGAM98 precursor RNA, herein designated VGAM PRECURSOR RNA, folds onto itself, forming VGAM98 folded precursor RNA, herein designated VGAM FOLDED PRECURSOR RNA, which has a two-dimensional hairpin structure. As is well known in the art, this hairpin structure, is typical of RNA encoded by miRNA genes, and is due to the fact that the nucleotide sequence of the first half of the RNA encoded by a miRNA gene is an accurate or partial inversed-reversed sequence of the nucleotide sequence of the second half thereof.

[1330] An enzyme complex designated DICER COMPLEX, dices the VGAM98 folded precursor RNA, herein designated VGAM FOLDED PRECURSOR RNA, into VGAM98 RNA, herein designated VGAM RNA, a single stranded ˜22 nt long RNA segment. As is known in the art, dicing of a hairpin structured RNA precursor product into a short ˜22 nt RNA segment is catalyzed by an enzyme complex comprising an enzyme called Dicer together with other necessary proteins. A probable (over 72%) nucleotide sequence of VGAM98 RNA is designated SEQ ID:433, and is provided hereinbelow with reference to the sequence listing part.

[1331] VGAM98 host target gene, herein designated VGAM HOST TARGET GENE, encodes a corresponding messenger RNA, VGAM98 host target RNA, herein designated VGAM HOST TARGET RNA. VGAM98 host target RNA, herein designated VGAM HOST TARGET RNA, comprises three regions, as is typical of mRNA of a protein coding gene: a 5 untranslated region, a protein coding region and a 3 untranslated region, designated 5UTR, PROTEIN CODING and 3UTR respectively.

[1332] VGAM98 RNA, herein designated VGAM RNA, binds complementarily to one or more host target binding sites located in untranslated regions of VGAM98 host target RNA, herein designated VGAM HOST TARGET RNA. This complementary binding is due to the fact that the nucleotide sequence of VGAM98 RNA, herein designated VGAM RNA, is an accurate or a partial inversed-reversed sequence of the nucleotide sequence of each of the host target binding sites. As an illustration, FIG. 1 shows 3 such host target binding sites, designated BINDING SITE I, BINDING SITE II and BINDING SITE III respectively. It is appreciated that the number of host target binding sites shown in FIG. 1 is meant as an illustration only, and is not meant to be limiting VGAM98 RNA, herein designated VGAM RNA, may have a different number of host target binding sites in untranslated regions of a VGAM98 host target RNA, herein designated VGAM HOST TARGET RNA. It is further appreciated that while FIG. 1 depicts host target binding sites in the 3UTR region, this is meant as an example only these host target binding sites may be located in the 3UTR region, the 5UTR region, or in both 3UTR and 5UTR regions.

[1333] The complementary binding of VGAM98 RNA, herein designated VGAM RNA, to host target binding sites on VGAM98 host target RNA, herein designated VGAM HOST TARGET RNA, such as BINDING SITE I, BINDING SITE II and BINDING SITE III, inhibits translation of VGAM98 host target RNA, herein designated VGAM HOST TARGET RNA, into VGAM98 host target protein, herein designated VGAM HOST TARGET PROTEIN. VGAM host target protein is therefore outlined by a broken line.

[1334] It is appreciated that VGAM98 host target gene, herein designated VGAM HOST TARGET GENE, in fact represents a plurality of VGAM98 host target genes. The mRNA of each one of this plurality of VGAM98 host target genes comprises one or more host target binding sites, each having a nucleotide sequence which is at least partly complementary to VGAM98 RNA, herein designated VGAM RNA, and which when bound by VGAM98 RNA, herein designated VGAM RNA, causes inhibition of translation of respective one or more VGAM98 host target proteins.

[1335] It is further appreciated by one skilled in the art that the mode of translational inhibition illustrated by FIG. 1 with specific reference to translational inhibition exerted by VGAM98 gene, herein designated VGAM GENE, on one or more VGAM98 host target gene, herein designated VGAM HOST TARGET GENE, is in fact common to other known non-viral miRNA genes. As mentioned hereinabove with reference to the background section, although a specific complementary binding site has been demonstrated only for some of the known miRNA genes (primarily Lin-4 and Let-7), all other recently discovered miRNA genes are also believed by those skilled in the art to modulate expression of other genes by complementary binding, although specific complementary binding sites of these other miRNA genes have not yet been found (Ruvkun G., Perspective: Glimpses of a tiny RNA world, Science 294, 779 (2001)).

[1336] It is yet further appreciated that a function of VGAM98 is inhibition of expression of host target genes, as part of a novel viral mechanism of attacking a host. Accordingly, utilities of VGAM98 include diagnosis, prevention and treatment of viral infection by Vaccinia virus. Specific functions, and accordingly utilities, of VGAM98 correlate with, and may be deduced from, the identity of the host target genes which VGAM98 binds and inhibits, and the function of these host target genes, as elaborated hereinbelow.

[1337] Nucleotide sequences of the VGAM98 precursor RNA, herein designated VGAM PRECURSOR RNA, and of the diced VGAM98 RNA, herein designated VGAM RNA, and a schematic representation of the secondary folding of VGAM98 folded precursor RNA, herein designated VGAM FOLDED PRECURSOR RNA, of VGAM98 are further described hereinbelow with reference to Table 1.

[1338] Nucleotide sequences of host target binding sites, such as BINDING SITE-I, BINDING SITE-II and BINDING SITE-III of FIG. 1, found on, and schematic representation of the complementarity of each of these host target binding sites to VGAM98 RNA, herein designated VGAM RNA, are described hereinbelow with reference to Table 2.

[1339] FIG. 1 further provides a conceptual description of another novel bioinformatically detected viral gene of the present invention, referred to here as Viral Genomic Address Messenger 99 (VGAM99) viral gene, which modulates expression of respective host target genes thereof, the function and utility of which host target genes is known in the art.

[1340] VGAM99 is a novel bioinformatically detected regulatory, non protein coding, viral micro RNA (miRNA) gene. The method by which VGAM99 was detected is described hereinabove with reference to FIGS. 2-8.

[1341] VGAM99 gene, herein designated VGAM GENE, is a viral gene contained in the genome of Vaccinia virus. VGAM99 host target gene, herein designated VGAM HOST TARGET GENE, is a human gene contained in the human genome.

[1342] VGAM99 gene, herein designated VGAM GENE, encodes a VGAM99 precursor RNA, herein designated VGAM PRECURSOR RNA. Similar to other miRNA genes, and unlike most ordinary genes, VGAM99 precursor RNA, herein designated VGAM PRECURSOR RNA, does not encode a protein. A nucleotide sequence identical or highly similar to the nucleotide sequence of VGAM99 precursor RNA is designated SEQ ID:85, and is provided hereinbelow with reference to the sequence listing part. Nucleotide sequence SEQ ID:85 is located at position 39758 relative to the genome of Vaccinia virus.

[1343] VGAM99 precursor RNA, herein designated VGAM PRECURSOR RNA, folds onto itself, forming VGAM99 folded precursor RNA, herein designated VGAM FOLDED PRECURSOR RNA, which has a two-dimensional hairpin structure. As is well known in the art, this hairpin structure, is typical of RNA encoded by miRNA genes, and is due to the fact that the nucleotide sequence of the first half of the RNA encoded by a miRNA gene is an accurate or partial inversed-reversed sequence of the nucleotide sequence of the second half thereof.

[1344] An enzyme complex designated DICER COMPLEX, dices the VGAM99 folded precursor RNA, herein designated VGAM FOLDED PRECURSOR RNA, into VGAM99 RNA, herein designated VGAM RNA, a single stranded ˜22 nt long RNA segment. As is known in the art, dicing of a hairpin structured RNA precursor product into a short ˜22 nt RNA segment is catalyzed by an enzyme complex comprising an enzyme called Dicer together with other necessary proteins. A probable (over 73%) nucleotide sequence of VGAM99 RNA is designated SEQ ID:434, and is provided hereinbelow with reference to the sequence listing part.

[1345] VGAM99 host target gene, herein designated VGAM HOST TARGET GENE, encodes a corresponding messenger RNA, VGAM99 host target RNA, herein designated VGAM HOST TARGET RNA. VGAM99 host target RNA, herein designated VGAM HOST TARGET RNA, comprises three regions, as is typical of mRNA of a protein coding gene: a 5 untranslated region, a protein coding region and a 3 untranslated region, designated 5UTR, PROTEIN CODING and 3UTR respectively.

[1346] VGAM99 RNA, herein designated VGAM RNA, binds complementarily to one or more host target binding sites located in untranslated regions of VGAM99 host target RNA, herein designated VGAM HOST TARGET RNA. This complementary binding is due to the fact that the nucleotide sequence of VGAM99 RNA, herein designated VGAM RNA, is an accurate or a partial inversed-reversed sequence of the nucleotide sequence of each of the host target binding sites. As an illustration, FIG. 1 shows 3 such host target binding sites, designated BINDING SITE I, BINDING SITE II and BINDING SITE III respectively. It is appreciated that the number of host target binding sites shown in FIG. 1 is meant as an illustration only, and is not meant to be limiting VGAM99 RNA, herein designated VGAM RNA, may have a different number of host target binding sites in untranslated regions of a VGAM99 host target RNA, herein designated VGAM HOST TARGET RNA. It is further appreciated that while FIG. 1 depicts host target binding sites in the 3UTR region, this is meant as an example only these host target binding sites may be located in the 3UTR region, the 5UTR region, or in both 3UTR and 5UTR regions.

[1347] The complementary binding of VGAM99 RNA, herein designated VGAM RNA, to host target binding sites on VGAM99 host target RNA, herein designated VGAM HOST TARGET RNA, such as BINDING SITE I, BINDING SITE II and BINDING SITE III, inhibits translation of VGAM99 host target RNA, herein designated VGAM HOST TARGET RNA, into VGAM99 host target protein, herein designated VGAM HOST TARGET PROTEIN. VGAM host target protein is therefore outlined by a broken line.

[1348] It is appreciated that VGAM99 host target gene, herein designated VGAM HOST TARGET GENE, in fact represents a plurality of VGAM99 host target genes. The mRNA of each one of this plurality of VGAM99 host target genes comprises one or more host target binding sites, each having a nucleotide sequence which is at least partly complementary to VGAM99 RNA, herein designated VGAM RNA, and which when bound by VGAM99 RNA, herein designated VGAM RNA, causes inhibition of translation of respective one or more VGAM99 host target proteins.

[1349] It is further appreciated by one skilled in the art that the mode of translational inhibition illustrated by FIG. 1 with specific reference to translational inhibition exerted by VGAM99 gene, herein designated VGAM GENE, on one or more VGAM99 host target gene, herein designated VGAM HOST TARGET GENE, is in fact common to other known non-viral miRNA genes. As mentioned hereinabove with reference to the background section, although a specific complementary binding site has been demonstrated only for some of the known miRNA genes (primarily Lin-4 and Let-7), all other recently discovered miRNA genes are also believed by those skilled in the art to modulate expression of other genes by complementary binding, although specific complementary binding sites of these other miRNA genes have not yet been found (Ruvkun G., Perspective: Glimpses of a tiny RNA world, Science 294, 779 (2001)).

[1350] It is yet further appreciated that a function of VGAM99 is inhibition of expression of host target genes, as part of a novel viral mechanism of attacking a host. Accordingly, utilities of VGAM99 include diagnosis, prevention and treatment of viral infection by Vaccinia virus. Specific functions, and accordingly utilities, of VGAM99 correlate with, and may be deduced from, the identity of the host target genes which VGAM99 binds and inhibits, and the function of these host target genes, as elaborated hereinbelow.

[1351] Nucleotide sequences of the VGAM99 precursor RNA, herein designated VGAM PRECURSOR RNA, and of the diced VGAM99 RNA, herein designated VGAM RNA, and a schematic representation of the secondary folding of VGAM99 folded precursor RNA, herein designated VGAM FOLDED PRECURSOR RNA, of VGAM99 are further described hereinbelow with reference to Table 1.

[1352] Nucleotide sequences of host target binding sites, such as BINDING SITE-I, BINDING SITE-II and BINDING SITE-III of FIG. 1, found on, and schematic representation of the complementarity of each of these host target binding sites to VGAM99 RNA, herein designated VGAM RNA, are described hereinbelow with reference to Table 2.

[1353] FIG. 1 further provides a conceptual description of another novel bioinformatically detected viral gene of the present invention, referred to here as Viral Genomic Address Messenger 100 (VGAM100) viral gene, which modulates expression of respective host target genes thereof, the function and utility of which host target genes is known in the art.

[1354] VGAM100 is a novel bioinformatically detected regulatory, non protein coding, viral micro RNA (miRNA) gene. The method by which VGAM100 was detected is described hereinabove with reference to FIGS. 2-8.

[1355] VGAM100 gene, herein designated VGAM GENE, is a viral gene contained in the genome of Vaccinia virus. VGAM100 host target gene, herein designated VGAM HOST TARGET GENE, is a human gene contained in the human genome.

[1356] VGAM100 gene, herein designated VGAM GENE, encodes a VGAM100 precursor RNA, herein designated VGAM PRECURSOR RNA. Similar to other miRNA genes, and unlike most ordinary genes, VGAM100 precursor RNA, herein designated VGAM PRECURSOR RNA, does not encode a protein. A nucleotide sequence identical or highly similar to the nucleotide sequence of VGAM100 precursor RNA is designated SEQ ID:86, and is provided hereinbelow with reference to the sequence listing part. Nucleotide sequence SEQ ID:86 is located at position 36878 relative to the genome of Vaccinia virus.

[1357] VGAM100 precursor RNA, herein designated VGAM PRECURSOR RNA, folds onto itself, forming VGAM100 folded precursor RNA, herein designated VGAM FOLDED PRECURSOR RNA, which has a two-dimensional hairpin structure. As is well known in the art, this hairpin structure, is typical of RNA encoded by miRNA genes, and is due to the fact that the nucleotide sequence of the first half of the RNA encoded by a miRNA gene is an accurate or partial inversed-reversed sequence of the nucleotide sequence of the second half thereof.

[1358] An enzyme complex designated DICER COMPLEX, dices the VGAM100 folded precursor RNA, herein designated VGAM FOLDED PRECURSOR RNA, into VGAM100 RNA, herein designated VGAM RNA, a single stranded ˜22 nt long RNA segment. As is known in the art, dicing of a hairpin structured RNA precursor product into a short ˜22 nt RNA segment is catalyzed by an enzyme complex comprising an enzyme called Dicer together with other necessary proteins. A probable (over 82%) nucleotide sequence of VGAM100 RNA is designated SEQ ID:435, and is provided hereinbelow with reference to the sequence listing part.

[1359] VGAM100 host target gene, herein designated VGAM HOST TARGET GENE, encodes a corresponding messenger RNA, VGAM100 host target RNA, herein designated VGAM HOST TARGET RNA. VGAM100 host target RNA, herein designated VGAM HOST TARGET RNA, comprises three regions, as is typical of mRNA of a protein coding gene: a 5 untranslated region, a protein coding region and a 3 untranslated region, designated 5UTR, PROTEIN CODING and 3UTR respectively.

[1360] VGAM100 RNA, herein designated VGAM RNA, binds complementarily to one or more host target binding sites located in untranslated regions of VGAM100 host target RNA, herein designated VGAM HOST TARGET RNA. This complementary binding is due to the fact that the nucleotide sequence of VGAM100 RNA, herein designated VGAM RNA, is an accurate or a partial inversed-reversed sequence of the nucleotide sequence of each of the host target binding sites. As an illustration, FIG. 1 shows 3 such host target binding sites, designated BINDING SITE I, BINDING SITE II and BINDING SITE III respectively. It is appreciated that the number of host target binding sites shown in FIG. 1 is meant as an illustration only, and is not meant to be limiting VGAM100 RNA, herein designated VGAM RNA, may have a different number of host target binding sites in untranslated regions of a VGAM100 host target RNA, herein designated VGAM HOST TARGET RNA. It is further appreciated that while FIG. 1 depicts host target binding sites in the 3UTR region, this is meant as an example only these host target binding sites may be located in the 3UTR region, the 5UTR region, or in both 3UTR and 5UTR regions.

[1361] The complementary binding of VGAM100 RNA, herein designated VGAM RNA, to host target binding sites on VGAM100 host target RNA, herein designated VGAM HOST TARGET RNA, such as BINDING SITE I, BINDING SITE II and BINDING SITE III, inhibits translation of VGAM100 host target RNA, herein designated VGAM HOST TARGET RNA, into VGAM100 host target protein, herein designated VGAM HOST TARGET PROTEIN. VGAM host target protein is therefore outlined by a broken line.

[1362] It is appreciated that VGAM100 host target gene, herein designated VGAM HOST TARGET GENE, in fact represents a plurality of VGAM100 host target genes. The mRNA of each one of this plurality of VGAM100 host target genes comprises one or more host target binding sites, each having a nucleotide sequence which is at least partly complementary to VGAM100 RNA, herein designated VGAM RNA, and which when bound by VGAM100 RNA, herein designated VGAM RNA, causes inhibition of translation of respective one or more VGAM100 host target proteins.

[1363] It is further appreciated by one skilled in the art that the mode of translational inhibition illustrated by FIG. 1 with specific reference to translational inhibition exerted by VGAM100 gene, herein designated VGAM GENE, on one or more VGAM100 host target gene, herein designated VGAM HOST TARGET GENE, is in fact common to other known non-viral miRNA genes. As mentioned hereinabove with reference to the background section, although a specific complementary binding site has been demonstrated only for some of the known miRNA genes (primarily Lin-4 and Let-7), all other recently discovered miRNA genes are also believed by those skilled in the art to modulate expression of other genes by complementary binding, although specific complementary binding sites of these other miRNA genes have not yet been found (Ruvkun G., Perspective: Glimpses of a tiny RNA world, Science 294, 779 (2001)).

[1364] It is yet further appreciated that a function of VGAM100 is inhibition of expression of host target genes, as part of a novel viral mechanism of attacking a host. Accordingly, utilities of VGAM100 include diagnosis, prevention and treatment of viral infection by Vaccinia virus. Specific functions, and accordingly utilities, of VGAM100 correlate with, and may be deduced from, the identity of the host target genes which VGAM100 binds and inhibits, and the function of these host target genes, as elaborated hereinbelow.

[1365] Nucleotide sequences of the VGAM100 precursor RNA, herein designated VGAM PRECURSOR RNA, and of the diced VGAM100 RNA, herein designated VGAM RNA, and a schematic representation of the secondary folding of VGAM100 folded precursor RNA, herein designated VGAM FOLDED PRECURSOR RNA, of VGAM100 are further described hereinbelow with reference to Table 1.

[1366] Nucleotide sequences of host target binding sites, such as BINDING SITE-I, BINDING SITE-II and BINDING SITE-III of FIG. 1, found on, and schematic representation of the complementarity of each of these host target binding sites to VGAM100 RNA, herein designated VGAM RNA, are described hereinbelow with reference to Table 2.

[1367] FIG. 1 further provides a conceptual description of another novel bioinformatically detected viral gene of the present invention, referred to here as Viral Genomic Address Messenger 101 (VGAM101) viral gene, which modulates expression of respective host target genes thereof, the function and utility of which host target genes is known in the art.

[1368] VGAM101 is a novel bioinformatically detected regulatory, non protein coding, viral micro RNA (miRNA) gene. The method by which VGAM101 was detected is described hereinabove with reference to FIGS. 2-8.

[1369] VGAM101 gene, herein designated VGAM GENE, is a viral gene contained in the genome of Vaccinia virus. VGAM101 host target gene, herein designated VGAM HOST TARGET GENE, is a human gene contained in the human genome.

[1370] VGAM101 gene, herein designated VGAM GENE, encodes a VGAM101 precursor RNA, herein designated VGAM PRECURSOR RNA. Similar to other miRNA genes, and unlike most ordinary genes, VGAM101 precursor RNA, herein designated VGAM PRECURSOR RNA, does not encode a protein. A nucleotide sequence identical or highly similar to the nucleotide sequence of VGAM101 precursor RNA is designated SEQ ID:87, and is provided hereinbelow with reference to the sequence listing part. Nucleotide sequence SEQ ID:87 is located at position 41548 relative to the genome of Vaccinia virus.

[1371] VGAM101 precursor RNA, herein designated VGAM PRECURSOR RNA, folds onto itself, forming VGAM101 folded precursor RNA, herein designated VGAM FOLDED PRECURSOR RNA, which has a two-dimensional hairpin structure. As is well known in the art, this hairpin structure, is typical of RNA encoded by miRNA genes, and is due to the fact that the nucleotide sequence of the first half of the RNA encoded by a miRNA gene is an accurate or partial inversed-reversed sequence of the nucleotide sequence of the second half thereof.

[1372] An enzyme complex designated DICER COMPLEX, dices the VGAM101 folded precursor RNA, herein designated VGAM FOLDED PRECURSOR RNA, into VGAM101 RNA, herein designated VGAM RNA, a single stranded ˜22 nt long RNA segment. As is known in the art, dicing of a hairpin structured RNA precursor product into a short ˜22 nt RNA segment is catalyzed by an enzyme complex comprising an enzyme called Dicer together with other necessary proteins. A probable (over 83%) nucleotide sequence of VGAM101 RNA is designated SEQ ID:436, and is provided hereinbelow with reference to the sequence listing part.

[1373] VGAM101 host target gene, herein designated VGAM HOST TARGET GENE, encodes a corresponding messenger RNA, VGAM101 host target RNA, herein designated VGAM HOST TARGET RNA. VGAM101 host target RNA, herein designated VGAM HOST TARGET RNA, comprises three regions, as is typical of mRNA of a protein coding gene: a 5 untranslated region, a protein coding region and a 3 untranslated region, designated 5UTR, PROTEIN CODING and 3UTR respectively.

[1374] VGAM101 RNA, herein designated VGAM RNA, binds complementarily to one or more host target binding sites located in untranslated regions of VGAM101 host target RNA, herein designated VGAM HOST TARGET RNA. This complementary binding is due to the fact that the nucleotide sequence of VGAM101 RNA, herein designated VGAM RNA, is an accurate or a partial inversed-reversed sequence of the nucleotide sequence of each of the host target binding sites. As an illustration, FIG. 1 shows 3 such host target binding sites, designated BINDING SITE I, BINDING SITE II and BINDING SITE III respectively. It is appreciated that the number of host target binding sites shown in FIG. 1 is meant as an illustration only, and is not meant to be limiting VGAM101 RNA, herein designated VGAM RNA, may have a different number of host target binding sites in untranslated regions of a VGAM101 host target RNA, herein designated VGAM HOST TARGET RNA. It is further appreciated that while FIG. 1 depicts host target binding sites in the 3UTR region, this is meant as an example only these host target binding sites may be located in the 3UTR region, the 5UTR region, or in both 3UTR and 5UTR regions.

[1375] The complementary binding of VGAM101 RNA, herein designated VGAM RNA, to host target binding sites on VGAM101 host target RNA, herein designated VGAM HOST TARGET RNA, such as BINDING SITE I, BINDING SITE II and BINDING SITE III, inhibits translation of VGAM101 host target RNA, herein designated VGAM HOST TARGET RNA, into VGAM101 host target protein, herein designated VGAM HOST TARGET PROTEIN. VGAM host target protein is therefore outlined by a broken line.

[1376] It is appreciated that VGAM101 host target gene, herein designated VGAM HOST TARGET GENE, in fact represents a plurality of VGAM101 host target genes. The mRNA of each one of this plurality of VGAM101 host target genes comprises one or more host target binding sites, each having a nucleotide sequence which is at least partly complementary to VGAM101 RNA, herein designated VGAM RNA, and which when bound by VGAM101 RNA, herein designated VGAM RNA, causes inhibition of translation of respective one or more VGAM101 host target proteins.

[1377] It is further appreciated by one skilled in the art that the mode of translational inhibition illustrated by FIG. 1 with specific reference to translational inhibition exerted by VGAM101 gene, herein designated VGAM GENE, on one or more VGAM101 host target gene, herein designated VGAM HOST TARGET GENE, is in fact common to other known non-viral miRNA genes. As mentioned hereinabove with reference to the background section, although a specific complementary binding site has been demonstrated only for some of the known miRNA genes (primarily Lin-4 and Let-7), all other recently discovered miRNA genes are also believed by those skilled in the art to modulate expression of other genes by complementary binding, although specific complementary binding sites of these other miRNA genes have not yet been found (Ruvkun G., Perspective: Glimpses of a tiny RNA world, Science 294, 779 (2001)).

[1378] It is yet further appreciated that a function of VGAM101 is inhibition of expression of host target genes, as part of a novel viral mechanism of attacking a host. Accordingly, utilities of VGAM101 include diagnosis, prevention and treatment of viral infection by Vaccinia virus. Specific functions, and accordingly utilities, of VGAM101 correlate with, and may be deduced from, the identity of the host target genes which VGAM101 binds and inhibits, and the function of these host target genes, as elaborated hereinbelow.

[1379] Nucleotide sequences of the VGAM101 precursor RNA, herein designated VGAM PRECURSOR RNA, and of the diced VGAM101 RNA, herein designated VGAM RNA, and a schematic representation of the secondary folding of VGAM101 folded precursor RNA, herein designated VGAM FOLDED PRECURSOR RNA, of VGAM101 are further described hereinbelow with reference to Table 1.

[1380] Nucleotide sequences of host target binding sites, such as BINDING SITE-I, BINDING SITE-II and BINDING SITE-III of FIG. 1, found on, and schematic representation of the complementarity of each of these host target binding sites to VGAM101 RNA, herein designated VGAM RNA, are described hereinbelow with reference to Table 2.

[1381] FIG. 1 further provides a conceptual description of another novel bioinformatically detected viral gene of the present invention, referred to here as Viral Genomic Address Messenger 102 (VGAM102) viral gene, which modulates expression of respective host target genes thereof, the function and utility of which host target genes is known in the art.

[1382] VGAM102 is a novel bioinformatically detected regulatory, non protein coding, viral micro RNA (miRNA) gene. The method by which VGAM102 was detected is described hereinabove with reference to FIGS. 2-8.

[1383] VGAM102 gene, herein designated VGAM GENE, is a viral gene contained in the genome of Vaccinia virus. VGAM102 host target gene, herein designated VGAM HOST TARGET GENE, is a human gene contained in the human genome.

[1384] VGAM102 gene, herein designated VGAM GENE, encodes a VGAM102 precursor RNA, herein designated VGAM PRECURSOR RNA. Similar to other miRNA genes, and unlike most ordinary genes, VGAM102 precursor RNA, herein designated VGAM PRECURSOR RNA, does not encode a protein. A nucleotide sequence identical or highly similar to the nucleotide sequence of VGAM102 precursor RNA is designated SEQ ID:88, and is provided hereinbelow with reference to the sequence listing part. Nucleotide sequence SEQ ID:88 is located at position 41122 relative to the genome of Vaccinia virus.

[1385] VGAM102 precursor RNA, herein designated VGAM PRECURSOR RNA, folds onto itself, forming VGAM102 folded precursor RNA, herein designated VGAM FOLDED PRECURSOR RNA, which has a two-dimensional hairpin structure. As is well known in the art, this hairpin structure, is typical of RNA encoded by miRNA genes, and is due to the fact that the nucleotide sequence of the first half of the RNA encoded by a miRNA gene is an accurate or partial inversed-reversed sequence of the nucleotide sequence of the second half thereof.

[1386] An enzyme complex designated DICER COMPLEX, dices the VGAM102 folded precursor RNA, herein designated VGAM FOLDED PRECURSOR RNA, into VGAM102 RNA, herein designated VGAM RNA, a single stranded ˜22 nt long RNA segment. As is known in the art, dicing of a hairpin structured RNA precursor product into a short ˜22 nt RNA segment is catalyzed by an enzyme complex comprising an enzyme called Dicer together with other necessary proteins. A probable (over 73%) nucleotide sequence of VGAM102 RNA is designated SEQ ID:437, and is provided hereinbelow with reference to the sequence listing part.

[1387] VGAM102 host target gene, herein designated VGAM HOST TARGET GENE, encodes a corresponding messenger RNA, VGAM102 host target RNA, herein designated VGAM HOST TARGET RNA. VGAM102 host target RNA, herein designated VGAM HOST TARGET RNA, comprises three regions, as is typical of mRNA of a protein coding gene: a 5 untranslated region, a protein coding region and a 3 untranslated region, designated 5UTR, PROTEIN CODING and 3UTR respectively.

[1388] VGAM102 RNA, herein designated VGAM RNA, binds complementarily to one or more host target binding sites located in untranslated regions of VGAM102 host target RNA, herein designated VGAM HOST TARGET RNA. This complementary binding is due to the fact that the nucleotide sequence of VGAM102 RNA, herein designated VGAM RNA, is an accurate or a partial inversed-reversed sequence of the nucleotide sequence of each of the host target binding sites. As an illustration, FIG. 1 shows 3 such host target binding sites, designated BINDING SITE I, BINDING SITE II and BINDING SITE III respectively. It is appreciated that the number of host target binding sites shown in FIG. 1 is meant as an illustration only, and is not meant to be limiting VGAM102 RNA, herein designated VGAM RNA, may have a different number of host target binding sites in untranslated regions of a VGAM102 host target RNA, herein designated VGAM HOST TARGET RNA. It is further appreciated that while FIG. 1 depicts host target binding sites in the 3UTR region, this is meant as an example only these host target binding sites may be located in the 3UTR region, the 5UTR region, or in both 3UTR and 5UTR regions.

[1389] The complementary binding of VGAM102 RNA, herein designated VGAM RNA, to host target binding sites on VGAM102 host target RNA, herein designated VGAM HOST TARGET RNA, such as BINDING SITE I, BINDING SITE II and BINDING SITE III, inhibits translation of VGAM102 host target RNA, herein designated VGAM HOST TARGET RNA, into VGAM102 host target protein, herein designated VGAM HOST TARGET PROTEIN. VGAM host target protein is therefore outlined by a broken line.

[1390] It is appreciated that VGAM102 host target gene, herein designated VGAM HOST TARGET GENE, in fact represents a plurality of VGAM102 host target genes. The mRNA of each one of this plurality of VGAM102 host target genes comprises one or more host target binding sites, each having a nucleotide sequence which is at least partly complementary to VGAM102 RNA, herein designated VGAM RNA, and which when bound by VGAM102 RNA, herein designated VGAM RNA, causes inhibition of translation of respective one or more VGAM102 host target proteins.

[1391] It is further appreciated by one skilled in the art that the mode of translational inhibition illustrated by FIG. 1 with specific reference to translational inhibition exerted by VGAM102 gene, herein designated VGAM GENE, on one or more VGAM102 host target gene, herein designated VGAM HOST TARGET GENE, is in fact common to other known non-viral miRNA genes. As mentioned hereinabove with reference to the background section, although a specific complementary binding site has been demonstrated only for some of the known miRNA genes (primarily Lin-4 and Let-7), all other recently discovered miRNA genes are also believed by those skilled in the art to modulate expression of other genes by complementary binding, although specific complementary binding sites of these other miRNA genes have not yet been found (Ruvkun G., Perspective: Glimpses of a tiny RNA world, Science 294, 779 (2001)).

[1392] It is yet further appreciated that a function of VGAM102 is inhibition of expression of host target genes, as part of a novel viral mechanism of attacking a host. Accordingly, utilities of VGAM102 include diagnosis, prevention and treatment of viral infection by Vaccinia virus. Specific functions, and accordingly utilities, of VGAM102 correlate with, and may be deduced from, the identity of the host target genes which VGAM102 binds and inhibits, and the function of these host target genes, as elaborated hereinbelow.

[1393] Nucleotide sequences of the VGAM102 precursor RNA, herein designated VGAM PRECURSOR RNA, and of the diced VGAM102 RNA, herein designated VGAM RNA, and a schematic representation of the secondary folding of VGAM102 folded precursor RNA, herein designated VGAM FOLDED PRECURSOR RNA, of VGAM102 are further described hereinbelow with reference to Table 1.

[1394] Nucleotide sequences of host target binding sites, such as BINDING SITE-I, BINDING SITE-II and BINDING SITE-III of FIG. 1, found on, and schematic representation of the complementarity of each of these host target binding sites to VGAM102 RNA, herein designated VGAM RNA, are described hereinbelow with reference to Table 2.

[1395] FIG. 1 further provides a conceptual description of another novel bioinformatically detected viral gene of the present invention, referred to here as Viral Genomic Address Messenger 103 (VGAM103) viral gene, which modulates expression of respective host target genes thereof, the function and utility of which host target genes is known in the art.

[1396] VGAM103 is a novel bioinformatically detected regulatory, non protein coding, viral micro RNA (miRNA) gene. The method by which VGAM103 was detected is described hereinabove with reference to FIGS. 2-8.

[1397] VGAM103 gene, herein designated VGAM GENE, is a viral gene contained in the genome of Vaccinia virus. VGAM103 host target gene, herein designated VGAM HOST TARGET GENE, is a human gene contained in the human genome.

[1398] VGAM103 gene, herein designated VGAM GENE, encodes a VGAM103 precursor RNA, herein designated VGAM PRECURSOR RNA. Similar to other miRNA genes, and unlike most ordinary genes, VGAM103 precursor RNA, herein designated VGAM PRECURSOR RNA, does not encode a protein. A nucleotide sequence identical or highly similar to the nucleotide sequence of VGAM103 precursor RNA is designated SEQ ID:89, and is provided hereinbelow with reference to the sequence listing part. Nucleotide sequence SEQ ID:89 is located at position 42559 relative to the genome of Vaccinia virus.

[1399] VGAM103 precursor RNA, herein designated VGAM PRECURSOR RNA, folds onto itself, forming VGAM103 folded precursor RNA, herein designated VGAM FOLDED PRECURSOR RNA, which has a two-dimensional hairpin structure. As is well known in the art, this hairpin structure, is typical of RNA encoded by miRNA genes, and is due to the fact that the nucleotide sequence of the first half of the RNA encoded by a miRNA gene is an accurate or partial inversed-reversed sequence of the nucleotide sequence of the second half thereof.

[1400] An enzyme complex designated DICER COMPLEX, dices the VGAM103 folded precursor RNA, herein designated VGAM FOLDED PRECURSOR RNA, into VGAM103 RNA, herein designated VGAM RNA, a single stranded ˜22 nt long RNA segment. As is known in the art, dicing of a hairpin structured RNA precursor product into a short ˜22 nt RNA segment is catalyzed by an enzyme complex comprising an enzyme called Dicer together with other necessary proteins. A probable (over 74%) nucleotide sequence of VGAM103 RNA is designated SEQ ID:438, and is provided hereinbelow with reference to the sequence listing part.

[1401] VGAM103 host target gene, herein designated VGAM HOST TARGET GENE, encodes a corresponding messenger RNA, VGAM103 host target RNA, herein designated VGAM HOST TARGET RNA. VGAM103 host target RNA, herein designated VGAM HOST TARGET RNA, comprises three regions, as is typical of mRNA of a protein coding gene: a 5 untranslated region, a protein coding region and a 3 untranslated region, designated 5UTR, PROTEIN CODING and 3UTR respectively.

[1402] VGAM103 RNA, herein designated VGAM RNA, binds complementarily to one or more host target binding sites located in untranslated regions of VGAM103 host target RNA, herein designated VGAM HOST TARGET RNA. This complementary binding is due to the fact that the nucleotide sequence of VGAM103 RNA, herein designated VGAM RNA, is an accurate or a partial inversed-reversed sequence of the nucleotide sequence of each of the host target binding sites. As an illustration, FIG. 1 shows 3 such host target binding sites, designated BINDING SITE I, BINDING SITE II and BINDING SITE III respectively. It is appreciated that the number of host target binding sites shown in FIG. 1 is meant as an illustration only, and is not meant to be limiting VGAM103 RNA, herein designated VGAM RNA, may have a different number of host target binding sites in untranslated regions of a VGAM103 host target RNA, herein designated VGAM HOST TARGET RNA. It is further appreciated that while FIG. 1 depicts host target binding sites in the 3UTR region, this is meant as an example only these host target binding sites may be located in the 3UTR region, the 5UTR region, or in both 3UTR and 5UTR regions.

[1403] The complementary binding of VGAM103 RNA, herein designated VGAM RNA, to host target binding sites on VGAM103 host target RNA, herein designated VGAM HOST TARGET RNA, such as BINDING SITE I, BINDING SITE II and BINDING SITE III, inhibits translation of VGAM103 host target RNA, herein designated VGAM HOST TARGET RNA, into VGAM103 host target protein, herein designated VGAM HOST TARGET PROTEIN. VGAM host target protein is therefore outlined by a broken line.

[1404] It is appreciated that VGAM103 host target gene, herein designated VGAM HOST TARGET GENE, in fact represents a plurality of VGAM103 host target genes. The mRNA of each one of this plurality of VGAM103 host target genes comprises one or more host target binding sites, each having a nucleotide sequence which is at least partly complementary to VGAM103 RNA, herein designated VGAM RNA, and which when bound by VGAM103 RNA, herein designated VGAM RNA, causes inhibition of translation of respective one or more VGAM103 host target proteins.

[1405] It is further appreciated by one skilled in the art that the mode of translational inhibition illustrated by FIG. 1 with specific reference to translational inhibition exerted by VGAM103 gene, herein designated VGAM GENE, on one or more VGAM103 host target gene, herein designated VGAM HOST TARGET GENE, is in fact common to other known non-viral miRNA genes. As mentioned hereinabove with reference to the background section, although a specific complementary binding site has been demonstrated only for some of the known miRNA genes (primarily Lin-4 and Let-7), all other recently discovered miRNA genes are also believed by those skilled in the art to modulate expression of other genes by complementary binding, although specific complementary binding sites of these other miRNA genes have not yet been found (Ruvkun G., Perspective: Glimpses of a tiny RNA world, Science 294, 779 (2001)).

[1406] It is yet further appreciated that a function of VGAM103 is inhibition of expression of host target genes, as part of a novel viral mechanism of attacking a host. Accordingly, utilities of VGAM103 include diagnosis, prevention and treatment of viral infection by Vaccinia virus. Specific functions, and accordingly utilities, of VGAM103 correlate with, and may be deduced from, the identity of the host target genes which VGAM103 binds and inhibits, and the function of these host target genes, as elaborated hereinbelow.

[1407] Nucleotide sequences of the VGAM103 precursor RNA, herein designated VGAM PRECURSOR RNA, and of the diced VGAM103 RNA, herein designated VGAM RNA, and a schematic representation of the secondary folding of VGAM103 folded precursor RNA, herein designated VGAM FOLDED PRECURSOR RNA, of VGAM103 are further described hereinbelow with reference to Table 1.

[1408] Nucleotide sequences of host target binding sites, such as BINDING SITE-I, BINDING SITE-II and BINDING SITE-III of FIG. 1, found on, and schematic representation of the complementarity of each of these host target binding sites to VGAM103 RNA, herein designated VGAM RNA, are described hereinbelow with reference to Table 2.

[1409] FIG. 1 further provides a conceptual description of another novel bioinformatically detected viral gene of the present invention, referred to here as Viral Genomic Address Messenger 104 (VGAM104) viral gene, which modulates expression of respective host target genes thereof, the function and utility of which host target genes is known in the art.

[1410] VGAM104 is a novel bioinformatically detected regulatory, non protein coding, viral micro RNA (miRNA) gene. The method by which VGAM104 was detected is described hereinabove with reference to FIGS. 2-8.

[1411] VGAM104 gene, herein designated VGAM GENE, is a viral gene contained in the genome of Vaccinia virus. VGAM104 host target gene, herein designated VGAM HOST TARGET GENE, is a human gene contained in the human genome.

[1412] VGAM104 gene, herein designated VGAM GENE, encodes a VGAM104 precursor RNA, herein designated VGAM PRECURSOR RNA. Similar to other miRNA genes, and unlike most ordinary genes, VGAM104 precursor RNA, herein designated VGAM PRECURSOR RNA, does not encode a protein. A nucleotide sequence identical or highly similar to the nucleotide sequence of VGAM104 precursor RNA is designated SEQ ID:90, and is provided hereinbelow with reference to the sequence listing part. Nucleotide sequence SEQ ID:90 is located at position 44309 relative to the genome of Vaccinia virus.

[1413] VGAM104 precursor RNA, herein designated VGAM PRECURSOR RNA, folds onto itself, forming VGAM104 folded precursor RNA, herein designated VGAM FOLDED PRECURSOR RNA, which has a two-dimensional hairpin structure. As is well known in the art, this hairpin structure, is typical of RNA encoded by miRNA genes, and is due to the fact that the nucleotide sequence of the first half of the RNA encoded by a miRNA gene is an accurate or partial inversed-reversed sequence of the nucleotide sequence of the second half thereof.

[1414] An enzyme complex designated DICER COMPLEX, dices the VGAM104 folded precursor RNA, herein designated VGAM FOLDED PRECURSOR RNA, into VGAM104 RNA, herein designated VGAM RNA, a single stranded ˜22 nt long RNA segment. As is known in the art, dicing of a hairpin structured RNA precursor product into a short ˜22 nt RNA segment is catalyzed by an enzyme complex comprising an enzyme called Dicer together with other necessary proteins. A probable (over 79%) nucleotide sequence of VGAM104 RNA is designated SEQ ID:439, and is provided hereinbelow with reference to the sequence listing part.

[1415] VGAM104 host target gene, herein designated VGAM HOST TARGET GENE, encodes a corresponding messenger RNA, VGAM104 host target RNA, herein designated VGAM HOST TARGET RNA. VGAM104 host target RNA, herein designated VGAM HOST TARGET RNA, comprises three regions, as is typical of mRNA of a protein coding gene: a 5 untranslated region, a protein coding region and a 3 untranslated region, designated 5UTR, PROTEIN CODING and 3UTR respectively.

[1416] VGAM104 RNA, herein designated VGAM RNA, binds complementarily to one or more host target binding sites located in untranslated regions of VGAM104 host target RNA, herein designated VGAM HOST TARGET RNA. This complementary binding is due to the fact that the nucleotide sequence of VGAM104 RNA, herein designated VGAM RNA, is an accurate or a partial inversed-reversed sequence of the nucleotide sequence of each of the host target binding sites. As an illustration, FIG. 1 shows 3 such host target binding sites, designated BINDING SITE I, BINDING SITE II and BINDING SITE III respectively. It is appreciated that the number of host target binding sites shown in FIG. 1 is meant as an illustration only, and is not meant to be limiting VGAM104 RNA, herein designated VGAM RNA, may have a different number of host target binding sites in untranslated regions of a VGAM104 host target RNA, herein designated VGAM HOST TARGET RNA. It is further appreciated that while FIG. 1 depicts host target binding sites in the 3UTR region, this is meant as an example only these host target binding sites may be located in the 3UTR region, the 5UTR region, or in both 3UTR and 5UTR regions.

[1417] The complementary binding of VGAM104 RNA, herein designated VGAM RNA, to host target binding sites on VGAM104 host target RNA, herein designated VGAM HOST TARGET RNA, such as BINDING SITE I, BINDING SITE II and BINDING SITE III, inhibits translation of VGAM104 host target RNA, herein designated VGAM HOST TARGET RNA, into VGAM104 host target protein, herein designated VGAM HOST TARGET PROTEIN. VGAM host target protein is therefore outlined by a broken line.

[1418] It is appreciated that VGAM104 host target gene, herein designated VGAM HOST TARGET GENE, in fact represents a plurality of VGAM104 host target genes. The mRNA of each one of this plurality of VGAM104 host target genes comprises one or more host target binding sites, each having a nucleotide sequence which is at least partly complementary to VGAM104 RNA, herein designated VGAM RNA, and which when bound by VGAM104 RNA, herein designated VGAM RNA, causes inhibition of translation of respective one or more VGAM104 host target proteins.

[1419] It is further appreciated by one skilled in the art that the mode of translational inhibition illustrated by FIG. 1 with specific reference to translational inhibition exerted by VGAM104 gene, herein designated VGAM GENE, on one or more VGAM104 host target gene, herein designated VGAM HOST TARGET GENE, is in fact common to other known non-viral miRNA genes. As mentioned hereinabove with reference to the background section, although a specific complementary binding site has been demonstrated only for some of the known miRNA genes (primarily Lin-4 and Let-7), all other recently discovered miRNA genes are also believed by those skilled in the art to modulate expression of other genes by complementary binding, although specific complementary binding sites of these other miRNA genes have not yet been found (Ruvkun G., Perspective: Glimpses of a tiny RNA world, Science 294, 779 (2001)).

[1420] It is yet further appreciated that a function of VGAM104 is inhibition of expression of host target genes, as part of a novel viral mechanism of attacking a host. Accordingly, utilities of VGAM104 include diagnosis, prevention and treatment of viral infection by Vaccinia virus. Specific functions, and accordingly utilities, of VGAM104 correlate with, and may be deduced from, the identity of the host target genes which VGAM104 binds and inhibits, and the function of these host target genes, as elaborated hereinbelow.

[1421] Nucleotide sequences of the VGAM104 precursor RNA, herein designated VGAM PRECURSOR RNA, and of the diced VGAM104 RNA, herein designated VGAM RNA, and a schematic representation of the secondary folding of VGAM104 folded precursor RNA, herein designated VGAM FOLDED PRECURSOR RNA, of VGAM104 are further described hereinbelow with reference to Table 1.

[1422] Nucleotide sequences of host target binding sites, such as BINDING SITE-I, BINDING SITE-II and BINDING SITE-III of FIG. 1, found on, and schematic representation of the complementarity of each of these host target binding sites to VGAM104 RNA, herein designated VGAM RNA, are described hereinbelow with reference to Table 2.

[1423] FIG. 1 further provides a conceptual description of another novel bioinformatically detected viral gene of the present invention, referred to here as Viral Genomic Address Messenger 105 (VGAM105) viral gene, which modulates expression of respective host target genes thereof, the function and utility of which host target genes is known in the art.

[1424] VGAM105 is a novel bioinformatically detected regulatory, non protein coding, viral micro RNA (miRNA) gene. The method by which VGAM105 was detected is described hereinabove with reference to FIGS. 2-8.

[1425] VGAM105 gene, herein designated VGAM GENE, is a viral gene contained in the genome of Vaccinia virus. VGAM105 host target gene, herein designated VGAM HOST TARGET GENE, is a human gene contained in the human genome.

[1426] VGAM105 gene, herein designated VGAM GENE, encodes a VGAM105 precursor RNA, herein designated VGAM PRECURSOR RNA. Similar to other miRNA genes, and unlike most ordinary genes, VGAM105 precursor RNA, herein designated VGAM PRECURSOR RNA, does not encode a protein. A nucleotide sequence identical or highly similar to the nucleotide sequence of VGAM105 precursor RNA is designated SEQ ID:91, and is provided hereinbelow with reference to the sequence listing part. Nucleotide sequence SEQ ID:91 is located at position 44202 relative to the genome of Vaccinia virus.

[1427] VGAM105 precursor RNA, herein designated VGAM PRECURSOR RNA, folds onto itself, forming VGAM105 folded precursor RNA, herein designated VGAM FOLDED PRECURSOR RNA, which has a two-dimensional hairpin structure. As is well known in the art, this hairpin structure, is typical of RNA encoded by miRNA genes, and is due to the fact that the nucleotide sequence of the first half of the RNA encoded by a miRNA gene is an accurate or partial inversed-reversed sequence of the nucleotide sequence of the second half thereof.

[1428] An enzyme complex designated DICER COMPLEX, dices the VGAM105 folded precursor RNA, herein designated VGAM FOLDED PRECURSOR RNA, into VGAM105 RNA, herein designated VGAM RNA, a single stranded ˜22 nt long RNA segment. As is known in the art, dicing of a hairpin structured RNA precursor product into a short ˜22 nt RNA segment is catalyzed by an enzyme complex comprising an enzyme called Dicer together with other necessary proteins. A probable (over 70%) nucleotide sequence of VGAM105 RNA is designated SEQ ID:440, and is provided hereinbelow with reference to the sequence listing part.

[1429] VGAM105 host target gene, herein designated VGAM HOST TARGET GENE, encodes a corresponding messenger RNA, VGAM105 host target RNA, herein designated VGAM HOST TARGET RNA. VGAM105 host target RNA, herein designated VGAM HOST TARGET RNA, comprises three regions, as is typical of mRNA of a protein coding gene: a 5 untranslated region, a protein coding region and a 3 untranslated region, designated 5UTR, PROTEIN CODING and 3UTR respectively.

[1430] VGAM105 RNA, herein designated VGAM RNA, binds complementarily to one or more host target binding sites located in untranslated regions of VGAM105 host target RNA, herein designated VGAM HOST TARGET RNA. This complementary binding is due to the fact that the nucleotide sequence of VGAM105 RNA, herein designated VGAM RNA, is an accurate or a partial inversed-reversed sequence of the nucleotide sequence of each of the host target binding sites. As an illustration, FIG. 1 shows 3 such host target binding sites, designated BINDING SITE I, BINDING SITE II and BINDING SITE III respectively. It is appreciated that the number of host target binding sites shown in FIG. 1 is meant as an illustration only, and is not meant to be limiting VGAM105 RNA, herein designated VGAM RNA, may have a different number of host target binding sites in untranslated regions of a VGAM105 host target RNA, herein designated VGAM HOST TARGET RNA. It is further appreciated that while FIG. 1 depicts host target binding sites in the 3UTR region, this is meant as an example only these host target binding sites may be located in the 3UTR region, the 5UTR region, or in both 3UTR and 5UTR regions.

[1431] The complementary binding of VGAM105 RNA, herein designated VGAM RNA, to host target binding sites on VGAM105 host target RNA, herein designated VGAM HOST TARGET RNA, such as BINDING SITE I, BINDING SITE II and BINDING SITE III, inhibits translation of VGAM105 host target RNA, herein designated VGAM HOST TARGET RNA, into VGAM105 host target protein, herein designated VGAM HOST TARGET PROTEIN. VGAM host target protein is therefore outlined by a broken line.

[1432] It is appreciated that VGAM105 host target gene, herein designated VGAM HOST TARGET GENE, in fact represents a plurality of VGAM105 host target genes. The mRNA of each one of this plurality of VGAM105 host target genes comprises one or more host target binding sites, each having a nucleotide sequence which is at least partly complementary to VGAM105 RNA, herein designated VGAM RNA, and which when bound by VGAM105 RNA, herein designated VGAM RNA, causes inhibition of translation of respective one or more VGAM105 host target proteins.

[1433] It is further appreciated by one skilled in the art that the mode of translational inhibition illustrated by FIG. 1 with specific reference to translational inhibition exerted by VGAM105 gene, herein designated VGAM GENE, on one or more VGAM105 host target gene, herein designated VGAM HOST TARGET GENE, is in fact common to other known non-viral miRNA genes. As mentioned hereinabove with reference to the background section, although a specific complementary binding site has been demonstrated only for some of the known miRNA genes (primarily Lin-4 and Let-7), all other recently discovered miRNA genes are also believed by those skilled in the art to modulate expression of other genes by complementary binding, although specific complementary binding sites of these other miRNA genes have not yet been found (Ruvkun G., Perspective: Glimpses of a tiny RNA world, Science 294, 779 (2001)).

[1434] It is yet further appreciated that a function of VGAM105 is inhibition of expression of host target genes, as part of a novel viral mechanism of attacking a host. Accordingly, utilities of VGAM105 include diagnosis, prevention and treatment of viral infection by Vaccinia virus. Specific functions, and accordingly utilities, of VGAM105 correlate with, and may be deduced from, the identity of the host target genes which VGAM105 binds and inhibits, and the function of these host target genes, as elaborated hereinbelow.

[1435] Nucleotide sequences of the VGAM105 precursor RNA, herein designated VGAM PRECURSOR RNA, and of the diced VGAM105 RNA, herein designated VGAM RNA, and a schematic representation of the secondary folding of VGAM105 folded precursor RNA, herein designated VGAM FOLDED PRECURSOR RNA, of VGAM105 are further described hereinbelow with reference to Table 1.

[1436] Nucleotide sequences of host target binding sites, such as BINDING SITE-I, BINDING SITE-II and BINDING SITE-III of FIG. 1, found on, and schematic representation of the complementarity of each of these host target binding sites to VGAM105 RNA, herein designated VGAM RNA, are described hereinbelow with reference to Table 2.

[1437] FIG. 1 further provides a conceptual description of another novel bioinformatically detected viral gene of the present invention, referred to here as Viral Genomic Address Messenger 106 (VGAM106) viral gene, which modulates expression of respective host target genes thereof, the function and utility of which host target genes is known in the art.

[1438] VGAM106 is a novel bioinformatically detected regulatory, non protein coding, viral micro RNA (miRNA) gene. The method by which VGAM106 was detected is described hereinabove with reference to FIGS. 2-8.

[1439] VGAM106 gene, herein designated VGAM GENE, is a viral gene contained in the genome of Vaccinia virus. VGAM106 host target gene, herein designated VGAM HOST TARGET GENE, is a human gene contained in the human genome.

[1440] VGAM106 gene, herein designated VGAM GENE, encodes a VGAM106 precursor RNA, herein designated VGAM PRECURSOR RNA. Similar to other miRNA genes, and unlike most ordinary genes, VGAM106 precursor RNA, herein designated VGAM PRECURSOR RNA, does not encode a protein. A nucleotide sequence identical or highly similar to the nucleotide sequence of VGAM106 precursor RNA is designated SEQ ID:92, and is provided hereinbelow with reference to the sequence listing part. Nucleotide sequence SEQ ID:92 is located at position 43627 relative to the genome of Vaccinia virus.

[1441] VGAM106 precursor RNA, herein designated VGAM PRECURSOR RNA, folds onto itself, forming VGAM106 folded precursor RNA, herein designated VGAM FOLDED PRECURSOR RNA, which has a two-dimensional hairpin structure. As is well known in the art, this hairpin structure, is typical of RNA encoded by miRNA genes, and is due to the fact that the nucleotide sequence of the first half of the RNA encoded by a miRNA gene is an accurate or partial inversed-reversed sequence of the nucleotide sequence of the second half thereof.

[1442] An enzyme complex designated DICER COMPLEX, dices the VGAM106 folded precursor RNA, herein designated VGAM FOLDED PRECURSOR RNA, into VGAM106 RNA, herein designated VGAM RNA, a single stranded ˜22 nt long RNA segment. As is known in the art, dicing of a hairpin structured RNA precursor product into a short ˜22 nt RNA segment is catalyzed by an enzyme complex comprising an enzyme called Dicer together with other necessary proteins. A probable (over 81%) nucleotide sequence of VGAM106 RNA is designated SEQ ID:441, and is provided hereinbelow with reference to the sequence listing part.

[1443] VGAM106 host target gene, herein designated VGAM HOST TARGET GENE, encodes a corresponding messenger RNA, VGAM106 host target RNA, herein designated VGAM HOST TARGET RNA. VGAM106 host target RNA, herein designated VGAM HOST TARGET RNA, comprises three regions, as is typical of mRNA of a protein coding gene: a 5 untranslated region, a protein coding region and a 3 untranslated region, designated 5UTR, PROTEIN CODING and 3UTR respectively.

[1444] VGAM106 RNA, herein designated VGAM RNA, binds complementarily to one or more host target binding sites located in untranslated regions of VGAM106 host target RNA, herein designated VGAM HOST TARGET RNA. This complementary binding is due to the fact that the nucleotide sequence of VGAM106 RNA, herein designated VGAM RNA, is an accurate or a partial inversed-reversed sequence of the nucleotide sequence of each of the host target binding sites. As an illustration, FIG. 1 shows 3 such host target binding sites, designated BINDING SITE I, BINDING SITE II and BINDING SITE III respectively. It is appreciated that the number of host target binding sites shown in FIG. 1 is meant as an illustration only, and is not meant to be limiting VGAM106 RNA, herein designated VGAM RNA, may have a different number of host target binding sites in untranslated regions of a VGAM106 host target RNA, herein designated VGAM HOST TARGET RNA. It is further appreciated that while FIG. 1 depicts host target binding sites in the 3UTR region, this is meant as an example only these host target binding sites may be located in the 3UTR region, the 5UTR region, or in both 3UTR and 5UTR regions.

[1445] The complementary binding of VGAM106 RNA, herein designated VGAM RNA, to host target binding sites on VGAM106 host target RNA, herein designated VGAM HOST TARGET RNA, such as BINDING SITE I, BINDING SITE II and BINDING SITE III, inhibits translation of VGAM106 host target RNA, herein designated VGAM HOST TARGET RNA, into VGAM106 host target protein, herein designated VGAM HOST TARGET PROTEIN. VGAM host target protein is therefore outlined by a broken line.

[1446] It is appreciated that VGAM106 host target gene, herein designated VGAM HOST TARGET GENE, in fact represents a plurality of VGAM106 host target genes. The mRNA of each one of this plurality of VGAM106 host target genes comprises one or more host target binding sites, each having a nucleotide sequence which is at least partly complementary to VGAM106 RNA, herein designated VGAM RNA, and which when bound by VGAM106 RNA, herein designated VGAM RNA, causes inhibition of translation of respective one or more VGAM106 host target proteins.

[1447] It is further appreciated by one skilled in the art that the mode of translational inhibition illustrated by FIG. 1 with specific reference to translational inhibition exerted by VGAM106 gene, herein designated VGAM GENE, on one or more VGAM106 host target gene, herein designated VGAM HOST TARGET GENE, is in fact common to other known non-viral miRNA genes. As mentioned hereinabove with reference to the background section, although a specific complementary binding site has been demonstrated only for some of the known miRNA genes (primarily Lin-4 and Let-7), all other recently discovered miRNA genes are also believed by those skilled in the art to modulate expression of other genes by complementary binding, although specific complementary binding sites of these other miRNA genes have not yet been found (Ruvkun G., Perspective: Glimpses of a tiny RNA world, Science 294, 779 (2001)).

[1448] It is yet further appreciated that a function of VGAM106 is inhibition of expression of host target genes, as part of a novel viral mechanism of attacking a host. Accordingly, utilities of VGAM106 include diagnosis, prevention and treatment of viral infection by Vaccinia virus. Specific functions, and accordingly utilities, of VGAM106 correlate with, and may be deduced from, the identity of the host target genes which VGAM106 binds and inhibits, and the function of these host target genes, as elaborated hereinbelow.

[1449] Nucleotide sequences of the VGAM106 precursor RNA, herein designated VGAM PRECURSOR RNA, and of the diced VGAM106 RNA, herein designated VGAM RNA, and a schematic representation of the secondary folding of VGAM106 folded precursor RNA, herein designated VGAM FOLDED PRECURSOR RNA, of VGAM106 are further described hereinbelow with reference to Table 1.

[1450] Nucleotide sequences of host target binding sites, such as BINDING SITE-I, BINDING SITE-II and BINDING SITE-III of FIG. 1, found on, and schematic representation of the complementarity of each of these host target binding sites to VGAM106 RNA, herein designated VGAM RNA, are described hereinbelow with reference to Table 2.

[1451] FIG. 1 further provides a conceptual description of another novel bioinformatically detected viral gene of the present invention, referred to here as Viral Genomic Address Messenger 107 (VGAM107) viral gene, which modulates expression of respective host target genes thereof, the function and utility of which host target genes is known in the art.

[1452] VGAM107 is a novel bioinformatically detected regulatory, non protein coding, viral micro RNA (miRNA) gene. The method by which VGAM107 was detected is described hereinabove with reference to FIGS. 2-8.

[1453] VGAM107 gene, herein designated VGAM GENE, is a viral gene contained in the genome of Vaccinia virus. VGAM107 host target gene, herein designated VGAM HOST TARGET GENE, is a human gene contained in the human genome.

[1454] VGAM107 gene, herein designated VGAM GENE, encodes a VGAM107 precursor RNA, herein designated VGAM PRECURSOR RNA. Similar to other miRNA genes, and unlike most ordinary genes, VGAM107 precursor RNA, herein designated VGAM PRECURSOR RNA, does not encode a protein. A nucleotide sequence identical or highly similar to the nucleotide sequence of VGAM107 precursor RNA is designated SEQ ID:93, and is provided hereinbelow with reference to the sequence listing part. Nucleotide sequence SEQ ID:93 is located at position 44848 relative to the genome of Vaccinia virus.

[1455] VGAM107 precursor RNA, herein designated VGAM PRECURSOR RNA, folds onto itself, forming VGAM107 folded precursor RNA, herein designated VGAM FOLDED PRECURSOR RNA, which has a two-dimensional hairpin structure. As is well known in the art, this hairpin structure, is typical of RNA encoded by miRNA genes, and is due to the fact that the nucleotide sequence of the first half of the RNA encoded by a miRNA gene is an accurate or partial inversed-reversed sequence of the nucleotide sequence of the second half thereof.

[1456] An enzyme complex designated DICER COMPLEX, dices the VGAM107 folded precursor RNA, herein designated VGAM FOLDED PRECURSOR RNA, into VGAM107 RNA, herein designated VGAM RNA, a single stranded ˜22 nt long RNA segment. As is known in the art, dicing of a hairpin structured RNA precursor product into a short ˜22 nt RNA segment is catalyzed by an enzyme complex comprising an enzyme called Dicer together with other necessary proteins. A probable (over 73%) nucleotide sequence of VGAM107 RNA is designated SEQ ID:442, and is provided hereinbelow with reference to the sequence listing part.

[1457] VGAM107 host target gene, herein designated VGAM HOST TARGET GENE, encodes a corresponding messenger RNA, VGAM107 host target RNA, herein designated VGAM HOST TARGET RNA. VGAM107 host target RNA, herein designated VGAM HOST TARGET RNA, comprises three regions, as is typical of mRNA of a protein coding gene: a 5 untranslated region, a protein coding region and a 3 untranslated region, designated 5UTR, PROTEIN CODING and 3UTR respectively.

[1458] VGAM107 RNA, herein designated VGAM RNA, binds complementarily to one or more host target binding sites located in untranslated regions of VGAM107 host target RNA, herein designated VGAM HOST TARGET RNA. This complementary binding is due to the fact that the nucleotide sequence of VGAM107 RNA, herein designated VGAM RNA, is an accurate or a partial inversed-reversed sequence of the nucleotide sequence of each of the host target binding sites. As an illustration, FIG. 1 shows 3 such host target binding sites, designated BINDING SITE I, BINDING SITE II and BINDING SITE III respectively. It is appreciated that the number of host target binding sites shown in FIG. 1 is meant as an illustration only, and is not meant to be limiting VGAM107 RNA, herein designated VGAM RNA, may have a different number of host target binding sites in untranslated regions of a VGAM107 host target RNA, herein designated VGAM HOST TARGET RNA. It is further appreciated that while FIG. 1 depicts host target binding sites in the 3UTR region, this is meant as an example only these host target binding sites may be located in the 3UTR region, the 5UTR region, or in both 3UTR and 5UTR regions.

[1459] The complementary binding of VGAM107 RNA, herein designated VGAM RNA, to host target binding sites on VGAM107 host target RNA, herein designated VGAM HOST TARGET RNA, such as BINDING SITE I, BINDING SITE II and BINDING SITE III, inhibits translation of VGAM107 host target RNA, herein designated VGAM HOST TARGET RNA, into VGAM107 host target protein, herein designated VGAM HOST TARGET PROTEIN. VGAM host target protein is therefore outlined by a broken line.

[1460] It is appreciated that VGAM107 host target gene, herein designated VGAM HOST TARGET GENE, in fact represents a plurality of VGAM107 host target genes. The mRNA of each one of this plurality of VGAM107 host target genes comprises one or more host target binding sites, each having a nucleotide sequence which is at least partly complementary to VGAM107 RNA, herein designated VGAM RNA, and which when bound by VGAM107 RNA, herein designated VGAM RNA, causes inhibition of translation of respective one or more VGAM107 host target proteins.

[1461] It is further appreciated by one skilled in the art that the mode of translational inhibition illustrated by FIG. 1 with specific reference to translational inhibition exerted by VGAM107 gene, herein designated VGAM GENE, on one or more VGAM107 host target gene, herein designated VGAM HOST TARGET GENE, is in fact common to other known non-viral miRNA genes. As mentioned hereinabove with reference to the background section, although a specific complementary binding site has been demonstrated only for some of the known miRNA genes (primarily Lin-4 and Let-7), all other recently discovered miRNA genes are also believed by those skilled in the art to modulate expression of other genes by complementary binding, although specific complementary binding sites of these other miRNA genes have not yet been found (Ruvkun G., Perspective: Glimpses of a tiny RNA world, Science 294, 779 (2001)).

[1462] It is yet further appreciated that a function of VGAM107 is inhibition of expression of host target genes, as part of a novel viral mechanism of attacking a host. Accordingly, utilities of VGAM107 include diagnosis, prevention and treatment of viral infection by Vaccinia virus. Specific functions, and accordingly utilities, of VGAM107 correlate with, and may be deduced from, the identity of the host target genes which VGAM107 binds and inhibits, and the function of these host target genes, as elaborated hereinbelow.

[1463] Nucleotide sequences of the VGAM107 precursor RNA, herein designated VGAM PRECURSOR RNA, and of the diced VGAM107 RNA, herein designated VGAM RNA, and a schematic representation of the secondary folding of VGAM107 folded precursor RNA, herein designated VGAM FOLDED PRECURSOR RNA, of VGAM107 are further described hereinbelow with reference to Table 1.

[1464] Nucleotide sequences of host target binding sites, such as BINDING SITE-I, BINDING SITE-II and BINDING SITE-III of FIG. 1, found on, and schematic representation of the complementarity of each of these host target binding sites to VGAM107 RNA, herein designated VGAM RNA, are described hereinbelow with reference to Table 2.

[1465] FIG. 1 further provides a conceptual description of another novel bioinformatically detected viral gene of the present invention, referred to here as Viral Genomic Address Messenger 108 (VGAM108) viral gene, which modulates expression of respective host target genes thereof, the function and utility of which host target genes is known in the art.

[1466] VGAM108 is a novel bioinformatically detected regulatory, non protein coding, viral micro RNA (miRNA) gene. The method by which VGAM108 was detected is described hereinabove with reference to FIGS. 2-8.

[1467] VGAM108 gene, herein designated VGAM GENE, is a viral gene contained in the genome of Vaccinia virus. VGAM108 host target gene, herein designated VGAM HOST TARGET GENE, is a human gene contained in the human genome.

[1468] VGAM108 gene, herein designated VGAM GENE, encodes a VGAM108 precursor RNA, herein designated VGAM PRECURSOR RNA. Similar to other miRNA genes, and unlike most ordinary genes, VGAM108 precursor RNA, herein designated VGAM PRECURSOR RNA, does not encode a protein. A nucleotide sequence identical or highly similar to the nucleotide sequence of VGAM108 precursor RNA is designated SEQ ID:94, and is provided hereinbelow with reference to the sequence listing part. Nucleotide sequence SEQ ID:94 is located at position 43844 relative to the genome of Vaccinia virus.

[1469] VGAM108 precursor RNA, herein designated VGAM PRECURSOR RNA, folds onto itself, forming VGAM108 folded precursor RNA, herein designated VGAM FOLDED PRECURSOR RNA, which has a two-dimensional hairpin structure. As is well known in the art, this hairpin structure, is typical of RNA encoded by miRNA genes, and is due to the fact that the nucleotide sequence of the first half of the RNA encoded by a miRNA gene is an accurate or partial inversed-reversed sequence of the nucleotide sequence of the second half thereof.

[1470] An enzyme complex designated DICER COMPLEX, dices the VGAM108 folded precursor RNA, herein designated VGAM FOLDED PRECURSOR RNA, into VGAM108 RNA, herein designated VGAM RNA, a single stranded ˜22 nt long RNA segment. As is known in the art, dicing of a hairpin structured RNA precursor product into a short ˜22 nt RNA segment is catalyzed by an enzyme complex comprising an enzyme called Dicer together with other necessary proteins. A probable (over 90%) nucleotide sequence of VGAM108 RNA is designated SEQ ID:443, and is provided hereinbelow with reference to the sequence listing part.

[1471] VGAM108 host target gene, herein designated VGAM HOST TARGET GENE, encodes a corresponding messenger RNA, VGAM108 host target RNA, herein designated VGAM HOST TARGET RNA. VGAM108 host target RNA, herein designated VGAM HOST TARGET RNA, comprises three regions, as is typical of mRNA of a protein coding gene: a 5 untranslated region, a protein coding region and a 3 untranslated region, designated 5UTR, PROTEIN CODING and 3UTR respectively.

[1472] VGAM108 RNA, herein designated VGAM RNA, binds complementarily to one or more host target binding sites located in untranslated regions of VGAM108 host target RNA, herein designated VGAM HOST TARGET RNA. This complementary binding is due to the fact that the nucleotide sequence of VGAM108 RNA, herein designated VGAM RNA, is an accurate or a partial inversed-reversed sequence of the nucleotide sequence of each of the host target binding sites. As an illustration, FIG. 1 shows 3 such host target binding sites, designated BINDING SITE I, BINDING SITE II and BINDING SITE III respectively. It is appreciated that the number of host target binding sites shown in FIG. 1 is meant as an illustration only, and is not meant to be limiting VGAM108 RNA, herein designated VGAM RNA, may have a different number of host target binding sites in untranslated regions of a VGAM108 host target RNA, herein designated VGAM HOST TARGET RNA. It is further appreciated that while FIG. 1 depicts host target binding sites in the 3UTR region, this is meant as an example only these host target binding sites may be located in the 3UTR region, the 5UTR region, or in both 3UTR and 5UTR regions.

[1473] The complementary binding of VGAM108 RNA, herein designated VGAM RNA, to host target binding sites on VGAM108 host target RNA, herein designated VGAM HOST TARGET RNA, such as BINDING SITE I, BINDING SITE II and BINDING SITE III, inhibits translation of VGAM108 host target RNA, herein designated VGAM HOST TARGET RNA, into VGAM108 host target protein, herein designated VGAM HOST TARGET PROTEIN. VGAM host target protein is therefore outlined by a broken line.

[1474] It is appreciated that VGAM108 host target gene, herein designated VGAM HOST TARGET GENE, in fact represents a plurality of VGAM108 host target genes. The mRNA of each one of this plurality of VGAM108 host target genes comprises one or more host target binding sites, each having a nucleotide sequence which is at least partly complementary to VGAM108 RNA, herein designated VGAM RNA, and which when bound by VGAM108 RNA, herein designated VGAM RNA, causes inhibition of translation of respective one or more VGAM108 host target proteins.

[1475] It is further appreciated by one skilled in the art that the mode of translational inhibition illustrated by FIG. 1 with specific reference to translational inhibition exerted by VGAM108 gene, herein designated VGAM GENE, on one or more VGAM108 host target gene, herein designated VGAM HOST TARGET GENE, is in fact common to other known non-viral miRNA genes. As mentioned hereinabove with reference to the background section, although a specific complementary binding site has been demonstrated only for some of the known miRNA genes (primarily Lin-4 and Let-7), all other recently discovered miRNA genes are also believed by those skilled in the art to modulate expression of other genes by complementary binding, although specific complementary binding sites of these other miRNA genes have not yet been found (Ruvkun G., Perspective: Glimpses of a tiny RNA world, Science 294, 779 (2001)).

[1476] It is yet further appreciated that a function of VGAM108 is inhibition of expression of host target genes, as part of a novel viral mechanism of attacking a host. Accordingly, utilities of VGAM108 include diagnosis, prevention and treatment of viral infection by Vaccinia virus. Specific functions, and accordingly utilities, of VGAM108 correlate with, and may be deduced from, the identity of the host target genes which VGAM108 binds and inhibits, and the function of these host target genes, as elaborated hereinbelow.

[1477] Nucleotide sequences of the VGAM108 precursor RNA, herein designated VGAM PRECURSOR RNA, and of the diced VGAM108 RNA, herein designated VGAM RNA, and a schematic representation of the secondary folding of VGAM108 folded precursor RNA, herein designated VGAM FOLDED PRECURSOR RNA, of VGAM108 are further described hereinbelow with reference to Table 1.

[1478] Nucleotide sequences of host target binding sites, such as BINDING SITE-I, BINDING SITE-II and BINDING SITE-III of FIG. 1, found on, and schematic representation of the complementarity of each of these host target binding sites to VGAM108 RNA, herein designated VGAM RNA, are described hereinbelow with reference to Table 2.

[1479] FIG. 1 further provides a conceptual description of another novel bioinformatically detected viral gene of the present invention, referred to here as Viral Genomic Address Messenger 109 (VGAM109) viral gene, which modulates expression of respective host target genes thereof, the function and utility of which host target genes is known in the art.

[1480] VGAM109 is a novel bioinformatically detected regulatory, non protein coding, viral micro RNA (miRNA) gene. The method by which VGAM109 was detected is described hereinabove with reference to FIGS. 2-8.

[1481] VGAM109 gene, herein designated VGAM GENE, is a viral gene contained in the genome of Vaccinia virus. VGAM109 host target gene, herein designated VGAM HOST TARGET GENE, is a human gene contained in the human genome.

[1482] VGAM109 gene, herein designated VGAM GENE, encodes a VGAM109 precursor RNA, herein designated VGAM PRECURSOR RNA. Similar to other miRNA genes, and unlike most ordinary genes, VGAM109 precursor RNA, herein designated VGAM PRECURSOR RNA, does not encode a protein. A nucleotide sequence identical or highly similar to the nucleotide sequence of VGAM109 precursor RNA is designated SEQ ID:95, and is provided hereinbelow with reference to the sequence listing part. Nucleotide sequence SEQ ID:95 is located at position 46236 relative to the genome of Vaccinia virus.

[1483] VGAM109 precursor RNA, herein designated VGAM PRECURSOR RNA, folds onto itself, forming VGAM109 folded precursor RNA, herein designated VGAM FOLDED PRECURSOR RNA, which has a two-dimensional hairpin structure. As is well known in the art, this hairpin structure, is typical of RNA encoded by miRNA genes, and is due to the fact that the nucleotide sequence of the first half of the RNA encoded by a miRNA gene is an accurate or partial inversed-reversed sequence of the nucleotide sequence of the second half thereof.

[1484] An enzyme complex designated DICER COMPLEX, dices the VGAM109 folded precursor RNA, herein designated VGAM FOLDED PRECURSOR RNA, into VGAM109 RNA, herein designated VGAM RNA, a single stranded ˜22 nt long RNA segment. As is known in the art, dicing of a hairpin structured RNA precursor product into a short ˜22 nt RNA segment is catalyzed by an enzyme complex comprising an enzyme called Dicer together with other necessary proteins. A probable (over 79%) nucleotide sequence of VGAM109 RNA is designated SEQ ID:444, and is provided hereinbelow with reference to the sequence listing part.

[1485] VGAM109 host target gene, herein designated VGAM HOST TARGET GENE, encodes a corresponding messenger RNA, VGAM109 host target RNA, herein designated VGAM HOST TARGET RNA. VGAM109 host target RNA, herein designated VGAM HOST TARGET RNA, comprises three regions, as is typical of mRNA of a protein coding gene: a 5 untranslated region, a protein coding region and a 3 untranslated region, designated 5UTR, PROTEIN CODING and 3UTR respectively.

[1486] VGAM109 RNA, herein designated VGAM RNA, binds complementarily to one or more host target binding sites located in untranslated regions of VGAM109 host target RNA, herein designated VGAM HOST TARGET RNA. This complementary binding is due to the fact that the nucleotide sequence of VGAM109 RNA, herein designated VGAM RNA, is an accurate or a partial inversed-reversed sequence of the nucleotide sequence of each of the host target binding sites. As an illustration, FIG. 1 shows 3 such host target binding sites, designated BINDING SITE I, BINDING SITE II and BINDING SITE III respectively. It is appreciated that the number of host target binding sites shown in FIG. 1 is meant as an illustration only, and is not meant to be limiting VGAM109 RNA, herein designated VGAM RNA, may have a different number of host target binding sites in untranslated regions of a VGAM109 host target RNA, herein designated VGAM HOST TARGET RNA. It is further appreciated that while FIG. 1 depicts host target binding sites in the 3UTR region, this is meant as an example only these host target binding sites may be located in the 3UTR region, the 5UTR region, or in both 3UTR and 5UTR regions.

[1487] The complementary binding of VGAM109 RNA, herein designated VGAM RNA, to host target binding sites on VGAM109 host target RNA, herein designated VGAM HOST TARGET RNA, such as BINDING SITE I, BINDING SITE II and BINDING SITE III, inhibits translation of VGAM109 host target RNA, herein designated VGAM HOST TARGET RNA, into VGAM109 host target protein, herein designated VGAM HOST TARGET PROTEIN. VGAM host target protein is therefore outlined by a broken line.

[1488] It is appreciated that VGAM109 host target gene, herein designated VGAM HOST TARGET GENE, in fact represents a plurality of VGAM109 host target genes. The mRNA of each one of this plurality of VGAM109 host target genes comprises one or more host target binding sites, each having a nucleotide sequence which is at least partly complementary to VGAM109 RNA, herein designated VGAM RNA, and which when bound by VGAM109 RNA, herein designated VGAM RNA, causes inhibition of translation of respective one or more VGAM109 host target proteins.

[1489] It is further appreciated by one skilled in the art that the mode of translational inhibition illustrated by FIG. 1 with specific reference to translational inhibition exerted by VGAM109 gene, herein designated VGAM GENE, on one or more VGAM109 host target gene, herein designated VGAM HOST TARGET GENE, is in fact common to other known non-viral miRNA genes. As mentioned hereinabove with reference to the background section, although a specific complementary binding site has been demonstrated only for some of the known miRNA genes (primarily Lin-4 and Let-7), all other recently discovered miRNA genes are also believed by those skilled in the art to modulate expression of other genes by complementary binding, although specific complementary binding sites of these other miRNA genes have not yet been found (Ruvkun G., Perspective: Glimpses of a tiny RNA world, Science 294, 779 (2001)).

[1490] It is yet further appreciated that a function of VGAM109 is inhibition of expression of host target genes, as part of a novel viral mechanism of attacking a host. Accordingly, utilities of VGAM109 include diagnosis, prevention and treatment of viral infection by Vaccinia virus. Specific functions, and accordingly utilities, of VGAM109 correlate with, and may be deduced from, the identity of the host target genes which VGAM109 binds and inhibits, and the function of these host target genes, as elaborated hereinbelow.

[1491] Nucleotide sequences of the VGAM109 precursor RNA, herein designated VGAM PRECURSOR RNA, and of the diced VGAM109 RNA, herein designated VGAM RNA, and a schematic representation of the secondary folding of VGAM109 folded precursor RNA, herein designated VGAM FOLDED PRECURSOR RNA, of VGAM109 are further described hereinbelow with reference to Table 1.

[1492] Nucleotide sequences of host target binding sites, such as BINDING SITE-I, BINDING SITE-II and BINDING SITE-III of FIG. 1, found on, and schematic representation of the complementarity of each of these host target binding sites to VGAM109 RNA, herein designated VGAM RNA, are described hereinbelow with reference to Table 2.

[1493] FIG. 1 further provides a conceptual description of another novel bioinformatically detected viral gene of the present invention, referred to here as Viral Genomic Address Messenger 110 (VGAM110) viral gene, which modulates expression of respective host target genes thereof, the function and utility of which host target genes is known in the art.

[1494] VGAM110 is a novel bioinformatically detected regulatory, non protein coding, viral micro RNA (miRNA) gene. The method by which VGAM110 was detected is described hereinabove with reference to FIGS. 2-8.

[1495] VGAM110 gene, herein designated VGAM GENE, is a viral gene contained in the genome of Vaccinia virus. VGAM110 host target gene, herein designated VGAM HOST TARGET GENE, is a human gene contained in the human genome.

[1496] VGAM110 gene, herein designated VGAM GENE, encodes a VGAM110 precursor RNA, herein designated VGAM PRECURSOR RNA. Similar to other miRNA genes, and unlike most ordinary genes, VGAM110 precursor RNA, herein designated VGAM PRECURSOR RNA, does not encode a protein. A nucleotide sequence identical or highly similar to the nucleotide sequence of VGAM110 precursor RNA is designated SEQ ID:96, and is provided hereinbelow with reference to the sequence listing part. Nucleotide sequence SEQ ID:96 is located at position 51758 relative to the genome of Vaccinia virus.

[1497] VGAM110 precursor RNA, herein designated VGAM PRECURSOR RNA, folds onto itself, forming VGAM110 folded precursor RNA, herein designated VGAM FOLDED PRECURSOR RNA, which has a two-dimensional hairpin structure. As is well known in the art, this hairpin structure, is typical of RNA encoded by miRNA genes, and is due to the fact that the nucleotide sequence of the first half of the RNA encoded by a miRNA gene is an accurate or partial inversed-reversed sequence of the nucleotide sequence of the second half thereof.

[1498] An enzyme complex designated DICER COMPLEX, dices the VGAM110 folded precursor RNA, herein designated VGAM FOLDED PRECURSOR RNA, into VGAM110 RNA, herein designated VGAM RNA, a single stranded ˜22 nt long RNA segment. As is known in the art, dicing of a hairpin structured RNA precursor product into a short ˜22 nt RNA segment is catalyzed by an enzyme complex comprising an enzyme called Dicer together with other necessary proteins. A probable (over 83%) nucleotide sequence of VGAM110 RNA is designated SEQ ID:445, and is provided hereinbelow with reference to the sequence listing part.

[1499] VGAM110 host target gene, herein designated VGAM HOST TARGET GENE, encodes a corresponding messenger RNA, VGAM110 host target RNA, herein designated VGAM HOST TARGET RNA. VGAM110 host target RNA, herein designated VGAM HOST TARGET RNA, comprises three regions, as is typical of mRNA of a protein coding gene: a 5 untranslated region, a protein coding region and a 3 untranslated region, designated 5UTR, PROTEIN CODING and 3UTR respectively.

[1500] VGAM110 RNA, herein designated VGAM RNA, binds complementarily to one or more host target binding sites located in untranslated regions of VGAM110 host target RNA, herein designated VGAM HOST TARGET RNA. This complementary binding is due to the fact that the nucleotide sequence of VGAM110 RNA, herein designated VGAM RNA, is an accurate or a partial inversed-reversed sequence of the nucleotide sequence of each of the host target binding sites. As an illustration, FIG. 1 shows 3 such host target binding sites, designated BINDING SITE I, BINDING SITE II and BINDING SITE III respectively. It is appreciated that the number of host target binding sites shown in FIG. 1 is meant as an illustration only, and is not meant to be limiting VGAM110 RNA, herein designated VGAM RNA, may have a different number of host target binding sites in untranslated regions of a VGAM110 host target RNA, herein designated VGAM HOST TARGET RNA. It is further appreciated that while FIG. 1 depicts host target binding sites in the 3UTR region, this is meant as an example only these host target binding sites may be located in the 3UTR region, the 5UTR region, or in both 3UTR and 5UTR regions.

[1501] The complementary binding of VGAM110 RNA, herein designated VGAM RNA, to host target binding sites on VGAM110 host target RNA, herein designated VGAM HOST TARGET RNA, such as BINDING SITE I, BINDING SITE II and BINDING SITE III, inhibits translation of VGAM110 host target RNA, herein designated VGAM HOST TARGET RNA, into VGAM110 host target protein, herein designated VGAM HOST TARGET PROTEIN. VGAM host target protein is therefore outlined by a broken line.

[1502] It is appreciated that VGAM110 host target gene, herein designated VGAM HOST TARGET GENE, in fact represents a plurality of VGAM110 host target genes. The mRNA of each one of this plurality of VGAM110 host target genes comprises one or more host target binding sites, each having a nucleotide sequence which is at least partly complementary to VGAM110 RNA, herein designated VGAM RNA, and which when bound by VGAM110 RNA, herein designated VGAM RNA, causes inhibition of translation of respective one or more VGAM110 host target proteins.

[1503] It is further appreciated by one skilled in the art that the mode of translational inhibition illustrated by FIG. 1 with specific reference to translational inhibition exerted by VGAM110 gene, herein designated VGAM GENE, on one or more VGAM110 host target gene, herein designated VGAM HOST TARGET GENE, is in fact common to other known non-viral miRNA genes. As mentioned hereinabove with reference to the background section, although a specific complementary binding site has been demonstrated only for some of the known miRNA genes (primarily Lin-4 and Let-7), all other recently discovered miRNA genes are also believed by those skilled in the art to modulate expression of other genes by complementary binding, although specific complementary binding sites of these other miRNA genes have not yet been found (Ruvkun G., Perspective: Glimpses of a tiny RNA world, Science 294, 779 (2001)).

[1504] It is yet further appreciated that a function of VGAM110 is inhibition of expression of host target genes, as part of a novel viral mechanism of attacking a host. Accordingly, utilities of VGAM110 include diagnosis, prevention and treatment of viral infection by Vaccinia virus. Specific functions, and accordingly utilities, of VGAM110 correlate with, and may be deduced from, the identity of the host target genes which VGAM110 binds and inhibits, and the function of these host target genes, as elaborated hereinbelow.

[1505] Nucleotide sequences of the VGAM110 precursor RNA, herein designated VGAM PRECURSOR RNA, and of the diced VGAM110 RNA, herein designated VGAM RNA, and a schematic representation of the secondary folding of VGAM110 folded precursor RNA, herein designated VGAM FOLDED PRECURSOR RNA, of VGAM110 are further described hereinbelow with reference to Table 1.

[1506] Nucleotide sequences of host target binding sites, such as BINDING SITE-I, BINDING SITE-II and BINDING SITE-III of FIG. 1, found on, and schematic representation of the complementarity of each of these host target binding sites to VGAM110 RNA, herein designated VGAM RNA, are described hereinbelow with reference to Table 2.

[1507] FIG. 1 further provides a conceptual description of another novel bioinformatically detected viral gene of the present invention, referred to here as Viral Genomic Address Messenger 111 (VGAM111) viral gene, which modulates expression of respective host target genes thereof, the function and utility of which host target genes is known in the art.

[1508] VGAM111 is a novel bioinformatically detected regulatory, non protein coding, viral micro RNA (miRNA) gene. The method by which VGAM111 was detected is described hereinabove with reference to FIGS. 2-8.

[1509] VGAM111 gene, herein designated VGAM GENE, is a viral gene contained in the genome of Vaccinia virus. VGAM111 host target gene, herein designated VGAM HOST TARGET GENE, is a human gene contained in the human genome.

[1510] VGAM111 gene, herein designated VGAM GENE, encodes a VGAM111 precursor RNA, herein designated VGAM PRECURSOR RNA. Similar to other miRNA genes, and unlike most ordinary genes, VGAM111 precursor RNA, herein designated VGAM PRECURSOR RNA, does not encode a protein. A nucleotide sequence identical or highly similar to the nucleotide sequence of VGAM111 precursor RNA is designated SEQ ID:97, and is provided hereinbelow with reference to the sequence listing part. Nucleotide sequence SEQ ID:97 is located at position 51252 relative to the genome of Vaccinia virus.

[1511] VGAM111 precursor RNA, herein designated VGAM PRECURSOR RNA, folds onto itself, forming VGAM111 folded precursor RNA, herein designated VGAM FOLDED PRECURSOR RNA, which has a two-dimensional hairpin structure. As is well known in the art, this hairpin structure, is typical of RNA encoded by miRNA genes, and is due to the fact that the nucleotide sequence of the first half of the RNA encoded by a miRNA gene is an accurate or partial inversed-reversed sequence of the nucleotide sequence of the second half thereof.

[1512] An enzyme complex designated DICER COMPLEX, dices the VGAM111 folded precursor RNA, herein designated VGAM FOLDED PRECURSOR RNA, into VGAM111 RNA, herein designated VGAM RNA, a single stranded ˜22 nt long RNA segment. As is known in the art, dicing of a hairpin structured RNA precursor product into a short ˜22 nt RNA segment is catalyzed by an enzyme complex comprising an enzyme called Dicer together with other necessary proteins. A probable (over 25%) nucleotide sequence of VGAM111 RNA is designated SEQ ID:446, and is provided hereinbelow with reference to the sequence listing part.

[1513] VGAM111 host target gene, herein designated VGAM HOST TARGET GENE, encodes a corresponding messenger RNA, VGAM111 host target RNA, herein designated VGAM HOST TARGET RNA. VGAM111 host target RNA, herein designated VGAM HOST TARGET RNA, comprises three regions, as is typical of mRNA of a protein coding gene: a 5 untranslated region, a protein coding region and a 3 untranslated region, designated 5UTR, PROTEIN CODING and 3UTR respectively.

[1514] VGAM111 RNA, herein designated VGAM RNA, binds complementarily to one or more host target binding sites located in untranslated regions of VGAM111 host target RNA, herein designated VGAM HOST TARGET RNA. This complementary binding is due to the fact that the nucleotide sequence of VGAM111 RNA, herein designated VGAM RNA, is an accurate or a partial inversed-reversed sequence of the nucleotide sequence of each of the host target binding sites. As an illustration, FIG. 1 shows 3 such host target binding sites, designated BINDING SITE I, BINDING SITE II and BINDING SITE III respectively. It is appreciated that the number of host target binding sites shown in FIG. 1 is meant as an illustration only, and is not meant to be limiting VGAM111 RNA, herein designated VGAM RNA, may have a different number of host target binding sites in untranslated regions of a VGAM111 host target RNA, herein designated VGAM HOST TARGET RNA. It is further appreciated that while FIG. 1 depicts host target binding sites in the 3UTR region, this is meant as an example only these host target binding sites may be located in the 3UTR region, the 5UTR region, or in both 3UTR and 5UTR regions.

[1515] The complementary binding of VGAM111 RNA, herein designated VGAM RNA, to host target binding sites on VGAM111 host target RNA, herein designated VGAM HOST TARGET RNA, such as BINDING SITE I, BINDING SITE II and BINDING SITE III, inhibits translation of VGAM111 host target RNA, herein designated VGAM HOST TARGET RNA, into VGAM111 host target protein, herein designated VGAM HOST TARGET PROTEIN. VGAM host target protein is therefore outlined by a broken line.

[1516] It is appreciated that VGAM111 host target gene, herein designated VGAM HOST TARGET GENE, in fact represents a plurality of VGAM111 host target genes. The mRNA of each one of this plurality of VGAM111 host target genes comprises one or more host target binding sites, each having a nucleotide sequence which is at least partly complementary to VGAM111 RNA, herein designated VGAM RNA, and which when bound by VGAM111 RNA, herein designated VGAM RNA, causes inhibition of translation of respective one or more VGAM111 host target proteins.

[1517] It is further appreciated by one skilled in the art that the mode of translational inhibition illustrated by FIG. 1 with specific reference to translational inhibition exerted by VGAM111 gene, herein designated VGAM GENE, on one or more VGAM111 host target gene, herein designated VGAM HOST TARGET GENE, is in fact common to other known non-viral miRNA genes. As mentioned hereinabove with reference to the background section, although a specific complementary binding site has been demonstrated only for some of the known miRNA genes (primarily Lin-4 and Let-7), all other recently discovered miRNA genes are also believed by those skilled in the art to modulate expression of other genes by complementary binding, although specific complementary binding sites of these other miRNA genes have not yet been found (Ruvkun G., Perspective: Glimpses of a tiny RNA world, Science 294, 779 (2001)).

[1518] It is yet further appreciated that a function of VGAM111 is inhibition of expression of host target genes, as part of a novel viral mechanism of attacking a host. Accordingly, utilities of VGAM111 include diagnosis, prevention and treatment of viral infection by Vaccinia virus. Specific functions, and accordingly utilities, of VGAM111 correlate with, and may be deduced from, the identity of the host target genes which VGAM111 binds and inhibits, and the function of these host target genes, as elaborated hereinbelow.

[1519] Nucleotide sequences of the VGAM111 precursor RNA, herein designated VGAM PRECURSOR RNA, and of the diced VGAM111 RNA, herein designated VGAM RNA, and a schematic representation of the secondary folding of VGAM111 folded precursor RNA, herein designated VGAM FOLDED PRECURSOR RNA, of VGAM111 are further described hereinbelow with reference to Table 1.

[1520] Nucleotide sequences of host target binding sites, such as BINDING SITE-I, BINDING SITE-II and BINDING SITE-III of FIG. 1, found on, and schematic representation of the complementarity of each of these host target binding sites to VGAM111 RNA, herein designated VGAM RNA, are described hereinbelow with reference to Table 2.

[1521] FIG. 1 further provides a conceptual description of another novel bioinformatically detected viral gene of the present invention, referred to here as Viral Genomic Address Messenger 112 (VGAM112) viral gene, which modulates expression of respective host target genes thereof, the function and utility of which host target genes is known in the art.

[1522] VGAM112 is a novel bioinformatically detected regulatory, non protein coding, viral micro RNA (miRNA) gene. The method by which VGAM112 was detected is described hereinabove with reference to FIGS. 2-8.

[1523] VGAM112 gene, herein designated VGAM GENE, is a viral gene contained in the genome of Vaccinia virus. VGAM112 host target gene, herein designated VGAM HOST TARGET GENE, is a human gene contained in the human genome.

[1524] VGAM112 gene, herein designated VGAM GENE, encodes a VGAM112 precursor RNA, herein designated VGAM PRECURSOR RNA. Similar to other miRNA genes, and unlike most ordinary genes, VGAM112 precursor RNA, herein designated VGAM PRECURSOR RNA, does not encode a protein. A nucleotide sequence identical or highly similar to the nucleotide sequence of VGAM112 precursor RNA is designated SEQ ID:98, and is provided hereinbelow with reference to the sequence listing part. Nucleotide sequence SEQ ID:98 is located at position 50148 relative to the genome of Vaccinia virus.

[1525] VGAM112 precursor RNA, herein designated VGAM PRECURSOR RNA, folds onto itself, forming VGAM112 folded precursor RNA, herein designated VGAM FOLDED PRECURSOR RNA, which has a two-dimensional hairpin structure. As is well known in the art, this hairpin structure, is typical of RNA encoded by miRNA genes, and is due to the fact that the nucleotide sequence of the first half of the RNA encoded by a miRNA gene is an accurate or partial inversed-reversed sequence of the nucleotide sequence of the second half thereof.

[1526] An enzyme complex designated DICER COMPLEX, dices the VGAM112 folded precursor RNA, herein designated VGAM FOLDED PRECURSOR RNA, into VGAM112 RNA, herein designated VGAM RNA, a single stranded ˜22 nt long RNA segment. As is known in the art, dicing of a hairpin structured RNA precursor product into a short ˜22 nt RNA segment is catalyzed by an enzyme complex comprising an enzyme called Dicer together with other necessary proteins. A probable (over 75%) nucleotide sequence of VGAM112 RNA is designated SEQ ID:447, and is provided hereinbelow with reference to the sequence listing part.

[1527] VGAM112 host target gene, herein designated VGAM HOST TARGET GENE, encodes a corresponding messenger RNA, VGAM112 host target RNA, herein designated VGAM HOST TARGET RNA. VGAM112 host target RNA, herein designated VGAM HOST TARGET RNA, comprises three regions, as is typical of mRNA of a protein coding gene: a 5 untranslated region, a protein coding region and a 3 untranslated region, designated 5UTR, PROTEIN CODING and 3UTR respectively.

[1528] VGAM112 RNA, herein designated VGAM RNA, binds complementarily to one or more host target binding sites located in untranslated regions of VGAM112 host target RNA, herein designated VGAM HOST TARGET RNA. This complementary binding is due to the fact that the nucleotide sequence of VGAM112 RNA, herein designated VGAM RNA, is an accurate or a partial inversed-reversed sequence of the nucleotide sequence of each of the host target binding sites. As an illustration, FIG. 1 shows 3 such host target binding sites, designated BINDING SITE I, BINDING SITE II and BINDING SITE III respectively. It is appreciated that the number of host target binding sites shown in FIG. 1 is meant as an illustration only, and is not meant to be limiting VGAM112 RNA, herein designated VGAM RNA, may have a different number of host target binding sites in untranslated regions of a VGAM112 host target RNA, herein designated VGAM HOST TARGET RNA. It is further appreciated that while FIG. 1 depicts host target binding sites in the 3UTR region, this is meant as an example only these host target binding sites may be located in the 3UTR region, the 5UTR region, or in both 3UTR and 5UTR regions.

[1529] The complementary binding of VGAM112 RNA, herein designated VGAM RNA, to host target binding sites on VGAM112 host target RNA, herein designated VGAM HOST TARGET RNA, such as BINDING SITE I, BINDING SITE II and BINDING SITE III, inhibits translation of VGAM112 host target RNA, herein designated VGAM HOST TARGET RNA, into VGAM112 host target protein, herein designated VGAM HOST TARGET PROTEIN. VGAM host target protein is therefore outlined by a broken line.

[1530] It is appreciated that VGAM112 host target gene, herein designated VGAM HOST TARGET GENE, in fact represents a plurality of VGAM112 host target genes. The mRNA of each one of this plurality of VGAM112 host target genes comprises one or more host target binding sites, each having a nucleotide sequence which is at least partly complementary to VGAM112 RNA, herein designated VGAM RNA, and which when bound by VGAM112 RNA, herein designated VGAM RNA, causes inhibition of translation of respective one or more VGAM112 host target proteins.

[1531] It is further appreciated by one skilled in the art that the mode of translational inhibition illustrated by FIG. 1 with specific reference to translational inhibition exerted by VGAM112 gene, herein designated VGAM GENE, on one or more VGAM112 host target gene, herein designated VGAM HOST TARGET GENE, is in fact common to other known non-viral miRNA genes. As mentioned hereinabove with reference to the background section, although a specific complementary binding site has been demonstrated only for some of the known miRNA genes (primarily Lin-4 and Let-7), all other recently discovered miRNA genes are also believed by those skilled in the art to modulate expression of other genes by complementary binding, although specific complementary binding sites of these other miRNA genes have not yet been found (Ruvkun G., Perspective: Glimpses of a tiny RNA world, Science 294, 779 (2001)).

[1532] It is yet further appreciated that a function of VGAM112 is inhibition of expression of host target genes, as part of a novel viral mechanism of attacking a host. Accordingly, utilities of VGAM112 include diagnosis, prevention and treatment of viral infection by Vaccinia virus. Specific functions, and accordingly utilities, of VGAM112 correlate with, and may be deduced from, the identity of the host target genes which VGAM112 binds and inhibits, and the function of these host target genes, as elaborated hereinbelow.

[1533] Nucleotide sequences of the VGAM112 precursor RNA, herein designated VGAM PRECURSOR RNA, and of the diced VGAM112 RNA, herein designated VGAM RNA, and a schematic representation of the secondary folding of VGAM112 folded precursor RNA, herein designated VGAM FOLDED PRECURSOR RNA, of VGAM112 are further described hereinbelow with reference to Table 1.

[1534] Nucleotide sequences of host target binding sites, such as BINDING SITE-I, BINDING SITE-II and BINDING SITE-III of FIG. 1, found on, and schematic representation of the complementarity of each of these host target binding sites to VGAM112 RNA, herein designated VGAM RNA, are described hereinbelow with reference to Table 2.

[1535] FIG. 1 further provides a conceptual description of another novel bioinformatically detected viral gene of the present invention, referred to here as Viral Genomic Address Messenger 113 (VGAM113) viral gene, which modulates expression of respective host target genes thereof, the function and utility of which host target genes is known in the art.

[1536] VGAM113 is a novel bioinformatically detected regulatory, non protein coding, viral micro RNA (miRNA) gene. The method by which VGAM113 was detected is described hereinabove with reference to FIGS. 2-8.

[1537] VGAM113 gene, herein designated VGAM GENE, is a viral gene contained in the genome of Vaccinia virus. VGAM113 host target gene, herein designated VGAM HOST TARGET GENE, is a human gene contained in the human genome.

[1538] VGAM113 gene, herein designated VGAM GENE, encodes a VGAM113 precursor RNA, herein designated VGAM PRECURSOR RNA. Similar to other miRNA genes, and unlike most ordinary genes, VGAM113 precursor RNA, herein designated VGAM PRECURSOR RNA, does not encode a protein. A nucleotide sequence identical or highly similar to the nucleotide sequence of VGAM113 precursor RNA is designated SEQ ID:99, and is provided hereinbelow with reference to the sequence listing part. Nucleotide sequence SEQ ID:99 is located at position 49143 relative to the genome of Vaccinia virus.

[1539] VGAM113 precursor RNA, herein designated VGAM PRECURSOR RNA, folds onto itself, forming VGAM113 folded precursor RNA, herein designated VGAM FOLDED PRECURSOR RNA, which has a two-dimensional hairpin structure. As is well known in the art, this hairpin structure, is typical of RNA encoded by miRNA genes, and is due to the fact that the nucleotide sequence of the first half of the RNA encoded by a miRNA gene is an accurate or partial inversed-reversed sequence of the nucleotide sequence of the second half thereof.

[1540] An enzyme complex designated DICER COMPLEX, dices the VGAM113 folded precursor RNA, herein designated VGAM FOLDED PRECURSOR RNA, into VGAM113 RNA, herein designated VGAM RNA, a single stranded ˜22 nt long RNA segment. As is known in the art, dicing of a hairpin structured RNA precursor product into a short ˜22 nt RNA segment is catalyzed by an enzyme complex comprising an enzyme called Dicer together with other necessary proteins. A probable (over 82%) nucleotide sequence of VGAM113 RNA is designated SEQ ID:448, and is provided hereinbelow with reference to the sequence listing part.

[1541] VGAM113 host target gene, herein designated VGAM HOST TARGET GENE, encodes a corresponding messenger RNA, VGAM113 host target RNA, herein designated VGAM HOST TARGET RNA. VGAM113 host target RNA, herein designated VGAM HOST TARGET RNA, comprises three regions, as is typical of mRNA of a protein coding gene: a 5 untranslated region, a protein coding region and a 3 untranslated region, designated 5UTR, PROTEIN CODING and 3UTR respectively.

[1542] VGAM113 RNA, herein designated VGAM RNA, binds complementarily to one or more host target binding sites located in untranslated regions of VGAM113 host target RNA, herein designated VGAM HOST TARGET RNA. This complementary binding is due to the fact that the nucleotide sequence of VGAM113 RNA, herein designated VGAM RNA, is an accurate or a partial inversed-reversed sequence of the nucleotide sequence of each of the host target binding sites. As an illustration, FIG. 1 shows 3 such host target binding sites, designated BINDING SITE I, BINDING SITE II and BINDING SITE III respectively. It is appreciated that the number of host target binding sites shown in FIG. 1 is meant as an illustration only, and is not meant to be limiting VGAM113 RNA, herein designated VGAM RNA, may have a different number of host target binding sites in untranslated regions of a VGAM113 host target RNA, herein designated VGAM HOST TARGET RNA. It is further appreciated that while FIG. 1 depicts host target binding sites in the 3UTR region, this is meant as an example only these host target binding sites may be located in the 3UTR region, the 5UTR region, or in both 3UTR and 5UTR regions.

[1543] The complementary binding of VGAM113 RNA, herein designated VGAM RNA, to host target binding sites on VGAM113 host target RNA, herein designated VGAM HOST TARGET RNA, such as BINDING SITE I, BINDING SITE II and BINDING SITE III, inhibits translation of VGAM113 host target RNA, herein designated VGAM HOST TARGET RNA, into VGAM113 host target protein, herein designated VGAM HOST TARGET PROTEIN. VGAM host target protein is therefore outlined by a broken line.

[1544] It is appreciated that VGAM113 host target gene, herein designated VGAM HOST TARGET GENE, in fact represents a plurality of VGAM113 host target genes. The mRNA of each one of this plurality of VGAM113 host target genes comprises one or more host target binding sites, each having a nucleotide sequence which is at least partly complementary to VGAM113 RNA, herein designated VGAM RNA, and which when bound by VGAM113 RNA, herein designated VGAM RNA, causes inhibition of translation of respective one or more VGAM113 host target proteins.

[1545] It is further appreciated by one skilled in the art that the mode of translational inhibition illustrated by FIG. 1 with specific reference to translational inhibition exerted by VGAM113 gene, herein designated VGAM GENE, on one or more VGAM113 host target gene, herein designated VGAM HOST TARGET GENE, is in fact common to other known non-viral miRNA genes. As mentioned hereinabove with reference to the background section, although a specific complementary binding site has been demonstrated only for some of the known miRNA genes (primarily Lin-4 and Let-7), all other recently discovered miRNA genes are also believed by those skilled in the art to modulate expression of other genes by complementary binding, although specific complementary binding sites of these other miRNA genes have not yet been found (Ruvkun G., Perspective: Glimpses of a tiny RNA world, Science 294, 779 (2001)).

[1546] It is yet further appreciated that a function of VGAM113 is inhibition of expression of host target genes, as part of a novel viral mechanism of attacking a host. Accordingly, utilities of VGAM113 include diagnosis, prevention and treatment of viral infection by Vaccinia virus. Specific functions, and accordingly utilities, of VGAM113 correlate with, and may be deduced from, the identity of the host target genes which VGAM113 binds and inhibits, and the function of these host target genes, as elaborated hereinbelow.

[1547] Nucleotide sequences of the VGAM113 precursor RNA, herein designated VGAM PRECURSOR RNA, and of the diced VGAM113 RNA, herein designated VGAM RNA, and a schematic representation of the secondary folding of VGAM113 folded precursor RNA, herein designated VGAM FOLDED PRECURSOR RNA, of VGAM113 are further described hereinbelow with reference to Table 1.

[1548] Nucleotide sequences of host target binding sites, such as BINDING SITE-I, BINDING SITE-II and BINDING SITE-III of FIG. 1, found on, and schematic representation of the complementarity of each of these host target binding sites to VGAM113 RNA, herein designated VGAM RNA, are described hereinbelow with reference to Table 2.

[1549] FIG. 1 further provides a conceptual description of another novel bioinformatically detected viral gene of the present invention, referred to here as Viral Genomic Address Messenger 114 (VGAM114) viral gene, which modulates expression of respective host target genes thereof, the function and utility of which host target genes is known in the art.

[1550] VGAM114 is a novel bioinformatically detected regulatory, non protein coding, viral micro RNA (miRNA) gene. The method by which VGAM114 was detected is described hereinabove with reference to FIGS. 2-8.

[1551] VGAM114 gene, herein designated VGAM GENE, is a viral gene contained in the genome of Vaccinia virus. VGAM114 host target gene, herein designated VGAM HOST TARGET GENE, is a human gene contained in the human genome.

[1552] VGAM114 gene, herein designated VGAM GENE, encodes a VGAM114 precursor RNA, herein designated VGAM PRECURSOR RNA. Similar to other miRNA genes, and unlike most ordinary genes, VGAM114 precursor RNA, herein designated VGAM PRECURSOR RNA, does not encode a protein. A nucleotide sequence identical or highly similar to the nucleotide sequence of VGAM114 precursor RNA is designated SEQ ID:100, and is provided hereinbelow with reference to the sequence listing part. Nucleotide sequence SEQ ID: 100 is located at position 49722 relative to the genome of Vaccinia virus.

[1553] VGAM114 precursor RNA, herein designated VGAM PRECURSOR RNA, folds onto itself, forming VGAM114 folded precursor RNA, herein designated VGAM FOLDED PRECURSOR RNA, which has a two-dimensional hairpin structure. As is well known in the art, this hairpin structure, is typical of RNA encoded by miRNA genes, and is due to the fact that the nucleotide sequence of the first half of the RNA encoded by a miRNA gene is an accurate or partial inversed-reversed sequence of the nucleotide sequence of the second half thereof.

[1554] An enzyme complex designated DICER COMPLEX, dices the VGAM114 folded precursor RNA, herein designated VGAM FOLDED PRECURSOR RNA, into VGAM114 RNA, herein designated VGAM RNA, a single stranded ˜22 nt long RNA segment. As is known in the art, dicing of a hairpin structured RNA precursor product into a short ˜22 nt RNA segment is catalyzed by an enzyme complex comprising an enzyme called Dicer together with other necessary proteins. A probable (over 74%) nucleotide sequence of VGAM114 RNA is designated SEQ ID:449, and is provided hereinbelow with reference to the sequence listing part.

[1555] VGAM114 host target gene, herein designated VGAM HOST TARGET GENE, encodes a corresponding messenger RNA, VGAM114 host target RNA, herein designated VGAM HOST TARGET RNA. VGAM114 host target RNA, herein designated VGAM HOST TARGET RNA, comprises three regions, as is typical of mRNA of a protein coding gene: a 5 untranslated region, a protein coding region and a 3 untranslated region, designated 5UTR, PROTEIN CODING and 3UTR respectively.

[1556] VGAM114 RNA, herein designated VGAM RNA, binds complementarily to one or more host target binding sites located in untranslated regions of VGAM114 host target RNA, herein designated VGAM HOST TARGET RNA. This complementary binding is due to the fact that the nucleotide sequence of VGAM114 RNA, herein designated VGAM RNA, is an accurate or a partial inversed-reversed sequence of the nucleotide sequence of each of the host target binding sites. As an illustration, FIG. 1 shows 3 such host target binding sites, designated BINDING SITE I, BINDING SITE II and BINDING SITE III respectively. It is appreciated that the number of host target binding sites shown in FIG. 1 is meant as an illustration only, and is not meant to be limiting VGAM114 RNA, herein designated VGAM RNA, may have a different number of host target binding sites in untranslated regions of a VGAM114 host target RNA, herein designated VGAM HOST TARGET RNA. It is further appreciated that while FIG. 1 depicts host target binding sites in the 3UTR region, this is meant as an example only these host target binding sites may be located in the 3UTR region, the 5UTR region, or in both 3UTR and 5UTR regions.

[1557] The complementary binding of VGAM114 RNA, herein designated VGAM RNA, to host target binding sites on VGAM114 host target RNA, herein designated VGAM HOST TARGET RNA, such as BINDING SITE I, BINDING SITE II and BINDING SITE III, inhibits translation of VGAM114 host target RNA, herein designated VGAM HOST TARGET RNA, into VGAM114 host target protein, herein designated VGAM HOST TARGET PROTEIN. VGAM host target protein is therefore outlined by a broken line.

[1558] It is appreciated that VGAM114 host target gene, herein designated VGAM HOST TARGET GENE, in fact represents a plurality of VGAM114 host target genes. The mRNA of each one of this plurality of VGAM114 host target genes comprises one or more host target binding sites, each having a nucleotide sequence which is at least partly complementary to VGAM114 RNA, herein designated VGAM RNA, and which when bound by VGAM114 RNA, herein designated VGAM RNA, causes inhibition of translation of respective one or more VGAM114 host target proteins.

[1559] It is further appreciated by one skilled in the art that the mode of translational inhibition illustrated by FIG. 1 with specific reference to translational inhibition exerted by VGAM114 gene, herein designated VGAM GENE, on one or more VGAM114 host target gene, herein designated VGAM HOST TARGET GENE, is in fact common to other known non-viral miRNA genes. As mentioned hereinabove with reference to the background section, although a specific complementary binding site has been demonstrated only for some of the known miRNA genes (primarily Lin-4 and Let-7), all other recently discovered miRNA genes are also believed by those skilled in the art to modulate expression of other genes by complementary binding, although specific complementary binding sites of these other miRNA genes have not yet been found (Ruvkun G., Perspective: Glimpses of a tiny RNA world, Science 294, 779 (2001)).

[1560] It is yet further appreciated that a function of VGAM114 is inhibition of expression of host target genes, as part of a novel viral mechanism of attacking a host. Accordingly, utilities of VGAM114 include diagnosis, prevention and treatment of viral infection by Vaccinia virus. Specific functions, and accordingly utilities, of VGAM114 correlate with, and may be deduced from, the identity of the host target genes which VGAM114 binds and inhibits, and the function of these host target genes, as elaborated hereinbelow.

[1561] Nucleotide sequences of the VGAM114 precursor RNA, herein designated VGAM PRECURSOR RNA, and of the diced VGAM114 RNA, herein designated VGAM RNA, and a schematic representation of the secondary folding of VGAM114 folded precursor RNA, herein designated VGAM FOLDED PRECURSOR RNA, of VGAM114 are further described hereinbelow with reference to Table 1.

[1562] Nucleotide sequences of host target binding sites, such as BINDING SITE-I, BINDING SITE-II and BINDING SITE-III of FIG. 1, found on, and schematic representation of the complementarity of each of these host target binding sites to VGAM114 RNA, herein designated VGAM RNA, are described hereinbelow with reference to Table 2.

[1563] FIG. 1 further provides a conceptual description of another novel bioinformatically detected viral gene of the present invention, referred to here as Viral Genomic Address Messenger 115 (VGAM115) viral gene, which modulates expression of respective host target genes thereof, the function and utility of which host target genes is known in the art.

[1564] VGAM115 is a novel bioinformatically detected regulatory, non protein coding, viral micro RNA (miRNA) gene. The method by which VGAM115 was detected is described hereinabove with reference to FIGS. 2-8.

[1565] VGAM115 gene, herein designated VGAM GENE, is a viral gene contained in the genome of Vaccinia virus. VGAM115 host target gene, herein designated VGAM HOST TARGET GENE, is a human gene contained in the human genome.

[1566] VGAM115 gene, herein designated VGAM GENE, encodes a VGAM115 precursor RNA, herein designated VGAM PRECURSOR RNA. Similar to other miRNA genes, and unlike most ordinary genes, VGAM115 precursor RNA, herein designated VGAM PRECURSOR RNA, does not encode a protein. A nucleotide sequence identical or highly similar to the nucleotide sequence of VGAM115 precursor RNA is designated SEQ ID:101, and is provided hereinbelow with reference to the sequence listing part. Nucleotide sequence SEQ ID: 101 is located at position 49784 relative to the genome of Vaccinia virus.

[1567] VGAM115 precursor RNA, herein designated VGAM PRECURSOR RNA, folds onto itself, forming VGAM115 folded precursor RNA, herein designated VGAM FOLDED PRECURSOR RNA, which has a two-dimensional hairpin structure. As is well known in the art, this hairpin structure, is typical of RNA encoded by miRNA genes, and is due to the fact that the nucleotide sequence of the first half of the RNA encoded by a miRNA gene is an accurate or partial inversed-reversed sequence of the nucleotide sequence of the second half thereof.

[1568] An enzyme complex designated DICER COMPLEX, dices the VGAM115 folded precursor RNA, herein designated VGAM FOLDED PRECURSOR RNA, into VGAM115 RNA, herein designated VGAM RNA, a single stranded ˜22 nt long RNA segment. As is known in the art, dicing of a hairpin structured RNA precursor product into a short ˜22 nt RNA segment is catalyzed by an enzyme complex comprising an enzyme called Dicer together with other necessary proteins. A probable (over 82%) nucleotide sequence of VGAM115 RNA is designated SEQ ID:450, and is provided hereinbelow with reference to the sequence listing part.

[1569] VGAM115 host target gene, herein designated VGAM HOST TARGET GENE, encodes a corresponding messenger RNA, VGAM115 host target RNA, herein designated VGAM HOST TARGET RNA. VGAM115 host target RNA, herein designated VGAM HOST TARGET RNA, comprises three regions, as is typical of mRNA of a protein coding gene: a 5 untranslated region, a protein coding region and a 3 untranslated region, designated 5UTR, PROTEIN CODING and 3UTR respectively.

[1570] VGAM115 RNA, herein designated VGAM RNA, binds complementarily to one or more host target binding sites located in untranslated regions of VGAM115 host target RNA, herein designated VGAM HOST TARGET RNA. This complementary binding is due to the fact that the nucleotide sequence of VGAM115 RNA, herein designated VGAM RNA, is an accurate or a partial inversed-reversed sequence of the nucleotide sequence of each of the host target binding sites. As an illustration, FIG. 1 shows 3 such host target binding sites, designated BINDING SITE I, BINDING SITE II and BINDING SITE III respectively. It is appreciated that the number of host target binding sites shown in FIG. 1 is meant as an illustration only, and is not meant to be limiting VGAM115 RNA, herein designated VGAM RNA, may have a different number of host target binding sites in untranslated regions of a VGAM115 host target RNA, herein designated VGAM HOST TARGET RNA. It is further appreciated that while FIG. 1 depicts host target binding sites in the 3UTR region, this is meant as an example only these host target binding sites may be located in the 3UTR region, the 5UTR region, or in both 3UTR and 5UTR regions.

[1571] The complementary binding of VGAM115 RNA, herein designated VGAM RNA, to host target binding sites on VGAM115 host target RNA, herein designated VGAM HOST TARGET RNA, such as BINDING SITE I, BINDING SITE II and BINDING SITE III, inhibits translation of VGAM115 host target RNA, herein designated VGAM HOST TARGET RNA, into VGAM115 host target protein, herein designated VGAM HOST TARGET PROTEIN. VGAM host target protein is therefore outlined by a broken line.

[1572] It is appreciated that VGAM115 host target gene, herein designated VGAM HOST TARGET GENE, in fact represents a plurality of VGAM115 host target genes. The mRNA of each one of this plurality of VGAM115 host target genes comprises one or more host target binding sites, each having a nucleotide sequence which is at least partly complementary to VGAM115 RNA, herein designated VGAM RNA, and which when bound by VGAM115 RNA, herein designated VGAM RNA, causes inhibition of translation of respective one or more VGAM115 host target proteins.

[1573] It is further appreciated by one skilled in the art that the mode of translational inhibition illustrated by FIG. 1 with specific reference to translational inhibition exerted by VGAM115 gene, herein designated VGAM GENE, on one or more VGAM115 host target gene, herein designated VGAM HOST TARGET GENE, is in fact common to other known non-viral miRNA genes. As mentioned hereinabove with reference to the background section, although a specific complementary binding site has been demonstrated only for some of the known miRNA genes (primarily Lin-4 and Let-7), all other recently discovered miRNA genes are also believed by those skilled in the art to modulate expression of other genes by complementary binding, although specific complementary binding sites of these other miRNA genes have not yet been found (Ruvkun G., Perspective: Glimpses of a tiny RNA world, Science 294, 779 (2001)).

[1574] It is yet further appreciated that a function of VGAM115 is inhibition of expression of host target genes, as part of a novel viral mechanism of attacking a host. Accordingly, utilities of VGAM115 include diagnosis, prevention and treatment of viral infection by Vaccinia virus. Specific functions, and accordingly utilities, of VGAM115 correlate with, and may be deduced from, the identity of the host target genes which VGAM115 binds and inhibits, and the function of these host target genes, as elaborated hereinbelow.

[1575] Nucleotide sequences of the VGAM115 precursor RNA, herein designated VGAM PRECURSOR RNA, and of the diced VGAM115 RNA, herein designated VGAM RNA, and a schematic representation of the secondary folding of VGAM115 folded precursor RNA, herein designated VGAM FOLDED PRECURSOR RNA, of VGAM115 are further described hereinbelow with reference to Table 1.

[1576] Nucleotide sequences of host target binding sites, such as BINDING SITE-I, BINDING SITE-II and BINDING SITE-III of FIG. 1, found on, and schematic representation of the complementarity of each of these host target binding sites to VGAM115 RNA, herein designated VGAM RNA, are described hereinbelow with reference to Table 2.

[1577] FIG. 1 further provides a conceptual description of another novel bioinformatically detected viral gene of the present invention, referred to here as Viral Genomic Address Messenger 116 (VGAM116) viral gene, which modulates expression of respective host target genes thereof, the function and utility of which host target genes is known in the art.

[1578] VGAM116 is a novel bioinformatically detected regulatory, non protein coding, viral micro RNA (miRNA) gene. The method by which VGAM116 was detected is described hereinabove with reference to FIGS. 2-8.

[1579] VGAM116 gene, herein designated VGAM GENE, is a viral gene contained in the genome of Vaccinia virus. VGAM116 host target gene, herein designated VGAM HOST TARGET GENE, is a human gene contained in the human genome.

[1580] VGAM116 gene, herein designated VGAM GENE, encodes a VGAM116 precursor RNA, herein designated VGAM PRECURSOR RNA. Similar to other miRNA genes, and unlike most ordinary genes, VGAM116 precursor RNA, herein designated VGAM PRECURSOR RNA, does not encode a protein. A nucleotide sequence identical or highly similar to the nucleotide sequence of VGAM116 precursor RNA is designated SEQ ID:102, and is provided hereinbelow with reference to the sequence listing part. Nucleotide sequence SEQ ID: 102 is located at position 48815 relative to the genome of Vaccinia virus.

[1581] VGAM116 precursor RNA, herein designated VGAM PRECURSOR RNA, folds onto itself, forming VGAM116 folded precursor RNA, herein designated VGAM FOLDED PRECURSOR RNA, which has a two-dimensional hairpin structure. As is well known in the art, this hairpin structure, is typical of RNA encoded by miRNA genes, and is due to the fact that the nucleotide sequence of the first half of the RNA encoded by a miRNA gene is an accurate or partial inversed-reversed sequence of the nucleotide sequence of the second half thereof.

[1582] An enzyme complex designated DICER COMPLEX, dices the VGAM116 folded precursor RNA, herein designated VGAM FOLDED PRECURSOR RNA, into VGAM116 RNA, herein designated VGAM RNA, a single stranded ˜22 nt long RNA segment. As is known in the art, dicing of a hairpin structured RNA precursor product into a short ˜22 nt RNA segment is catalyzed by an enzyme complex comprising an enzyme called Dicer together with other necessary proteins. A probable (over 82%) nucleotide sequence of VGAM116 RNA is designated SEQ ID:451, and is provided hereinbelow with reference to the sequence listing part.

[1583] VGAM116 host target gene, herein designated VGAM HOST TARGET GENE, encodes a corresponding messenger RNA, VGAM116 host target RNA, herein designated VGAM HOST TARGET RNA. VGAM116 host target RNA, herein designated VGAM HOST TARGET RNA, comprises three regions, as is typical of mRNA of a protein coding gene: a 5 untranslated region, a protein coding region and a 3 untranslated region, designated 5UTR, PROTEIN CODING and 3UTR respectively.

[1584] VGAM116 RNA, herein designated VGAM RNA, binds complementarily to one or more host target binding sites located in untranslated regions of VGAM116 host target RNA, herein designated VGAM HOST TARGET RNA. This complementary binding is due to the fact that the nucleotide sequence of VGAM116 RNA, herein designated VGAM RNA, is an accurate or a partial inversed-reversed sequence of the nucleotide sequence of each of the host target binding sites. As an illustration, FIG. 1 shows 3 such host target binding sites, designated BINDING SITE I, BINDING SITE II and BINDING SITE III respectively. It is appreciated that the number of host target binding sites shown in FIG. 1 is meant as an illustration only, and is not meant to be limiting VGAM116 RNA, herein designated VGAM RNA, may have a different number of host target binding sites in untranslated regions of a VGAM116 host target RNA, herein designated VGAM HOST TARGET RNA. It is further appreciated that while FIG. 1 depicts host target binding sites in the 3UTR region, this is meant as an example only these host target binding sites may be located in the 3UTR region, the 5UTR region, or in both 3UTR and 5UTR regions.

[1585] The complementary binding of VGAM116 RNA, herein designated VGAM RNA, to host target binding sites on VGAM116 host target RNA, herein designated VGAM HOST TARGET RNA, such as BINDING SITE I, BINDING SITE II and BINDING SITE III, inhibits translation of VGAM116 host target RNA, herein designated VGAM HOST TARGET RNA, into VGAM116 host target protein, herein designated VGAM HOST TARGET PROTEIN. VGAM host target protein is therefore outlined by a broken line.

[1586] It is appreciated that VGAM116 host target gene, herein designated VGAM HOST TARGET GENE, in fact represents a plurality of VGAM116 host target genes. The mRNA of each one of this plurality of VGAM116 host target genes comprises one or more host target binding sites, each having a nucleotide sequence which is at least partly complementary to VGAM116 RNA, herein designated VGAM RNA, and which when bound by VGAM116 RNA, herein designated VGAM RNA, causes inhibition of translation of respective one or more VGAM116 host target proteins.

[1587] It is further appreciated by one skilled in the art that the mode of translational inhibition illustrated by FIG. 1 with specific reference to translational inhibition exerted by VGAM116 gene, herein designated VGAM GENE, on one or more VGAM116 host target gene, herein designated VGAM HOST TARGET GENE, is in fact common to other known non-viral miRNA genes. As mentioned hereinabove with reference to the background section, although a specific complementary binding site has been demonstrated only for some of the known miRNA genes (primarily Lin-4 and Let-7), all other recently discovered miRNA genes are also believed by those skilled in the art to modulate expression of other genes by complementary binding, although specific complementary binding sites of these other miRNA genes have not yet been found (Ruvkun G., Perspective: Glimpses of a tiny RNA world, Science 294, 779 (2001)).

[1588] It is yet further appreciated that a function of VGAM116 is inhibition of expression of host target genes, as part of a novel viral mechanism of attacking a host. Accordingly, utilities of VGAM116 include diagnosis, prevention and treatment of viral infection by Vaccinia virus. Specific functions, and accordingly utilities, of VGAM116 correlate with, and may be deduced from, the identity of the host target genes which VGAM116 binds and inhibits, and the function of these host target genes, as elaborated hereinbelow.

[1589] Nucleotide sequences of the VGAM116 precursor RNA, herein designated VGAM PRECURSOR RNA, and of the diced VGAM116 RNA, herein designated VGAM RNA, and a schematic representation of the secondary folding of VGAM116 folded precursor RNA, herein designated VGAM FOLDED PRECURSOR RNA, of VGAM116 are further described hereinbelow with reference to Table 1.

[1590] Nucleotide sequences of host target binding sites, such as BINDING SITE-I, BINDING SITE-II and BINDING SITE-III of FIG. 1, found on, and schematic representation of the complementarity of each of these host target binding sites to VGAM116 RNA, herein designated VGAM RNA, are described hereinbelow with reference to Table 2.

[1591] FIG. 1 further provides a conceptual description of another novel bioinformatically detected viral gene of the present invention, referred to here as Viral Genomic Address Messenger 117 (VGAM117) viral gene, which modulates expression of respective host target genes thereof, the function and utility of which host target genes is known in the art.

[1592] VGAM117 is a novel bioinformatically detected regulatory, non protein coding, viral micro RNA (miRNA) gene. The method by which VGAM117 was detected is described hereinabove with reference to FIGS. 2-8.

[1593] VGAM117 gene, herein designated VGAM GENE, is a viral gene contained in the genome of Vaccinia virus. VGAM117 host target gene, herein designated VGAM HOST TARGET GENE, is a human gene contained in the human genome.

[1594] VGAM117 gene, herein designated VGAM GENE, encodes a VGAM117 precursor RNA, herein designated VGAM PRECURSOR RNA. Similar to other miRNA genes, and unlike most ordinary genes, VGAM117 precursor RNA, herein designated VGAM PRECURSOR RNA, does not encode a protein. A nucleotide sequence identical or highly similar to the nucleotide sequence of VGAM117 precursor RNA is designated SEQ ID:103, and is provided hereinbelow with reference to the sequence listing part. Nucleotide sequence SEQ ID:103 is located at position 51120 relative to the genome of Vaccinia virus.

[1595] VGAM117 precursor RNA, herein designated VGAM PRECURSOR RNA, folds onto itself, forming VGAM117 folded precursor RNA, herein designated VGAM FOLDED PRECURSOR RNA, which has a two-dimensional hairpin structure. As is well known in the art, this hairpin structure, is typical of RNA encoded by miRNA genes, and is due to the fact that the nucleotide sequence of the first half of the RNA encoded by a miRNA gene is an accurate or partial inversed-reversed sequence of the nucleotide sequence of the second half thereof.

[1596] An enzyme complex designated DICER COMPLEX, dices the VGAM117 folded precursor RNA, herein designated VGAM FOLDED PRECURSOR RNA, into VGAM117 RNA, herein designated VGAM RNA, a single stranded ˜22 nt long RNA segment. As is known in the art, dicing of a hairpin structured RNA precursor product into a short ˜22 nt RNA segment is catalyzed by an enzyme complex comprising an enzyme called Dicer together with other necessary proteins. A probable (over 79%) nucleotide sequence of VGAM117 RNA is designated SEQ ID:452, and is provided hereinbelow with reference to the sequence listing part.

[1597] VGAM117 host target gene, herein designated VGAM HOST TARGET GENE, encodes a corresponding messenger RNA, VGAM117 host target RNA, herein designated VGAM HOST TARGET RNA. VGAM117 host target RNA, herein designated VGAM HOST TARGET RNA, comprises three regions, as is typical of mRNA of a protein coding gene: a 5 untranslated region, a protein coding region and a 3 untranslated region, designated 5UTR, PROTEIN CODING and 3UTR respectively.

[1598] VGAM117 RNA, herein designated VGAM RNA, binds complementarily to one or more host target binding sites located in untranslated regions of VGAM117 host target RNA, herein designated VGAM HOST TARGET RNA. This complementary binding is due to the fact that the nucleotide sequence of VGAM117 RNA, herein designated VGAM RNA, is an accurate or a partial inversed-reversed sequence of the nucleotide sequence of each of the host target binding sites. As an illustration, FIG. 1 shows 3 such host target binding sites, designated BINDING SITE I, BINDING SITE II and BINDING SITE III respectively. It is appreciated that the number of host target binding sites shown in FIG. 1 is meant as an illustration only, and is not meant to be limiting VGAM117 RNA, herein designated VGAM RNA, may have a different number of host target binding sites in untranslated regions of a VGAM117 host target RNA, herein designated VGAM HOST TARGET RNA. It is further appreciated that while FIG. 1 depicts host target binding sites in the 3UTR region, this is meant as an example only these host target binding sites may be located in the 3UTR region, the 5UTR region, or in both 3UTR and 5UTR regions.

[1599] The complementary binding of VGAM117 RNA, herein designated VGAM RNA, to host target binding sites on VGAM117 host target RNA, herein designated VGAM HOST TARGET RNA, such as BINDING SITE I, BINDING SITE II and BINDING SITE III, inhibits translation of VGAM117 host target RNA, herein designated VGAM HOST TARGET RNA, into VGAM117 host target protein, herein designated VGAM HOST TARGET PROTEIN. VGAM host target protein is therefore outlined by a broken line.

[1600] It is appreciated that VGAM117 host target gene, herein designated VGAM HOST TARGET GENE, in fact represents a plurality of VGAM117 host target genes. The mRNA of each one of this plurality of VGAM117 host target genes comprises one or more host target binding sites, each having a nucleotide sequence which is at least partly complementary to VGAM117 RNA, herein designated VGAM RNA, and which when bound by VGAM117 RNA, herein designated VGAM RNA, causes inhibition of translation of respective one or more VGAM117 host target proteins.

[1601] It is further appreciated by one skilled in the art that the mode of translational inhibition illustrated by FIG. 1 with specific reference to translational inhibition exerted by VGAM117 gene, herein designated VGAM GENE, on one or more VGAM117 host target gene, herein designated VGAM HOST TARGET GENE, is in fact common to other known non-viral miRNA genes. As mentioned hereinabove with reference to the background section, although a specific complementary binding site has been demonstrated only for some of the known miRNA genes (primarily Lin-4 and Let-7), all other recently discovered miRNA genes are also believed by those skilled in the art to modulate expression of other genes by complementary binding, although specific complementary binding sites of these other miRNA genes have not yet been found (Ruvkun G., Perspective: Glimpses of a tiny RNA world, Science 294, 779 (2001)).

[1602] It is yet further appreciated that a function of VGAM117 is inhibition of expression of host target genes, as part of a novel viral mechanism of attacking a host. Accordingly, utilities of VGAM117 include diagnosis, prevention and treatment of viral infection by Vaccinia virus. Specific functions, and accordingly utilities, of VGAM117 correlate with, and may be deduced from, the identity of the host target genes which VGAM117 binds and inhibits, and the function of these host target genes, as elaborated hereinbelow.

[1603] Nucleotide sequences of the VGAM117 precursor RNA, herein designated VGAM PRECURSOR RNA, and of the diced VGAM117 RNA, herein designated VGAM RNA, and a schematic representation of the secondary folding of VGAM117 folded precursor RNA, herein designated VGAM FOLDED PRECURSOR RNA, of VGAM117 are further described hereinbelow with reference to Table 1.

[1604] Nucleotide sequences of host target binding sites, such as BINDING SITE-I, BINDING SITE-II and BINDING SITE-III of FIG. 1, found on, and schematic representation of the complementarity of each of these host target binding sites to VGAM117 RNA, herein designated VGAM RNA, are described hereinbelow with reference to Table 2.

[1605] FIG. 1 further provides a conceptual description of another novel bioinformatically detected viral gene of the present invention, referred to here as Viral Genomic Address Messenger 118 (VGAM118) viral gene, which modulates expression of respective host target genes thereof, the function and utility of which host target genes is known in the art.

[1606] VGAM118 is a novel bioinformatically detected regulatory, non protein coding, viral micro RNA (miRNA) gene. The method by which VGAM118 was detected is described hereinabove with reference to FIGS. 2-8.

[1607] VGAM118 gene, herein designated VGAM GENE, is a viral gene contained in the genome of Vaccinia virus. VGAM118 host target gene, herein designated VGAM HOST TARGET GENE, is a human gene contained in the human genome.

[1608] VGAM118 gene, herein designated VGAM GENE, encodes a VGAM118 precursor RNA, herein designated VGAM PRECURSOR RNA. Similar to other miRNA genes, and unlike most ordinary genes, VGAM118 precursor RNA, herein designated VGAM PRECURSOR RNA, does not encode a protein. A nucleotide sequence identical or highly similar to the nucleotide sequence of VGAM118 precursor RNA is designated SEQ ID:104, and is provided hereinbelow with reference to the sequence listing part. Nucleotide sequence SEQ ID: 104 is located at position 50980 relative to the genome of Vaccinia virus.

[1609] VGAM118 precursor RNA, herein designated VGAM PRECURSOR RNA, folds onto itself, forming VGAM118 folded precursor RNA, herein designated VGAM FOLDED PRECURSOR RNA, which has a two-dimensional hairpin structure. As is well known in the art, this hairpin structure, is typical of RNA encoded by miRNA genes, and is due to the fact that the nucleotide sequence of the first half of the RNA encoded by a miRNA gene is an accurate or partial inversed-reversed sequence of the nucleotide sequence of the second half thereof.

[1610] An enzyme complex designated DICER COMPLEX, dices the VGAM118 folded precursor RNA, herein designated VGAM FOLDED PRECURSOR RNA, into VGAM118 RNA, herein designated VGAM RNA, a single stranded ˜22 nt long RNA segment. As is known in the art, dicing of a hairpin structured RNA precursor product into a short ˜22 nt RNA segment is catalyzed by an enzyme complex comprising an enzyme called Dicer together with other necessary proteins. A probable (over 80%) nucleotide sequence of VGAM118 RNA is designated SEQ ID:453, and is provided hereinbelow with reference to the sequence listing part.

[1611] VGAM118 host target gene, herein designated VGAM HOST TARGET GENE, encodes a corresponding messenger RNA, VGAM118 host target RNA, herein designated VGAM HOST TARGET RNA. VGAM118 host target RNA, herein designated VGAM HOST TARGET RNA, comprises three regions, as is typical of mRNA of a protein coding gene: a 5 untranslated region, a protein coding region and a 3 untranslated region, designated 5UTR, PROTEIN CODING and 3UTR respectively.

[1612] VGAM118 RNA, herein designated VGAM RNA, binds complementarily to one or more host target binding sites located in untranslated regions of VGAM118 host target RNA, herein designated VGAM HOST TARGET RNA. This complementary binding is due to the fact that the nucleotide sequence of VGAM118 RNA, herein designated VGAM RNA, is an accurate or a partial inversed-reversed sequence of the nucleotide sequence of each of the host target binding sites. As an illustration, FIG. 1 shows 3 such host target binding sites, designated BINDING SITE I, BINDING SITE II and BINDING SITE III respectively. It is appreciated that the number of host target binding sites shown in FIG. 1 is meant as an illustration only, and is not meant to be limiting VGAM118 RNA, herein designated VGAM RNA, may have a different number of host target binding sites in untranslated regions of a VGAM118 host target RNA, herein designated VGAM HOST TARGET RNA. It is further appreciated that while FIG. 1 depicts host target binding sites in the 3UTR region, this is meant as an example only these host target binding sites may be located in the 3UTR region, the 5UTR region, or in both 3UTR and 5UTR regions.

[1613] The complementary binding of VGAM118 RNA, herein designated VGAM RNA, to host target binding sites on VGAM118 host target RNA, herein designated VGAM HOST TARGET RNA, such as BINDING SITE I, BINDING SITE II and BINDING SITE III, inhibits translation of VGAM118 host target RNA, herein designated VGAM HOST TARGET RNA, into VGAM118 host target protein, herein designated VGAM HOST TARGET PROTEIN. VGAM host target protein is therefore outlined by a broken line.

[1614] It is appreciated that VGAM118 host target gene, herein designated VGAM HOST TARGET GENE, in fact represents a plurality of VGAM118 host target genes. The mRNA of each one of this plurality of VGAM118 host target genes comprises one or more host target binding sites, each having a nucleotide sequence which is at least partly complementary to VGAM118 RNA, herein designated VGAM RNA, and which when bound by VGAM118 RNA, herein designated VGAM RNA, causes inhibition of translation of respective one or more VGAM118 host target proteins.

[1615] It is further appreciated by one skilled in the art that the mode of translational inhibition illustrated by FIG. 1 with specific reference to translational inhibition exerted by VGAM118 gene, herein designated VGAM GENE, on one or more VGAM118 host target gene, herein designated VGAM HOST TARGET GENE, is in fact common to other known non-viral miRNA genes. As mentioned hereinabove with reference to the background section, although a specific complementary binding site has been demonstrated only for some of the known miRNA genes (primarily Lin-4 and Let-7), all other recently discovered miRNA genes are also believed by those skilled in the art to modulate expression of other genes by complementary binding, although specific complementary binding sites of these other miRNA genes have not yet been found (Ruvkun G., Perspective: Glimpses of a tiny RNA world, Science 294, 779 (2001)).

[1616] It is yet further appreciated that a function of VGAM118 is inhibition of expression of host target genes, as part of a novel viral mechanism of attacking a host. Accordingly, utilities of VGAM118 include diagnosis, prevention and treatment of viral infection by Vaccinia virus. Specific functions, and accordingly utilities, of VGAM118 correlate with, and may be deduced from, the identity of the host target genes which VGAM118 binds and inhibits, and the function of these host target genes, as elaborated hereinbelow.

[1617] Nucleotide sequences of the VGAM118 precursor RNA, herein designated VGAM PRECURSOR RNA, and of the diced VGAM118 RNA, herein designated VGAM RNA, and a schematic representation of the secondary folding of VGAM118 folded precursor RNA, herein designated VGAM FOLDED PRECURSOR RNA, of VGAM118 are further described hereinbelow with reference to Table 1.

[1618] Nucleotide sequences of host target binding sites, such as BINDING SITE-I, BINDING SITE-II and BINDING SITE-III of FIG. 1, found on, and schematic representation of the complementarity of each of these host target binding sites to VGAM118 RNA, herein designated VGAM RNA, are described hereinbelow with reference to Table 2.

[1619] FIG. 1 further provides a conceptual description of another novel bioinformatically detected viral gene of the present invention, referred to here as Viral Genomic Address Messenger 119 (VGAM119) viral gene, which modulates expression of respective host target genes thereof, the function and utility of which host target genes is known in the art.

[1620] VGAM119 is a novel bioinformatically detected regulatory, non protein coding, viral micro RNA (miRNA) gene. The method by which VGAM119 was detected is described hereinabove with reference to FIGS. 2-8.

[1621] VGAM119 gene, herein designated VGAM GENE, is a viral gene contained in the genome of Vaccinia virus. VGAM119 host target gene, herein designated VGAM HOST TARGET GENE, is a human gene contained in the human genome.

[1622] VGAM119 gene, herein designated VGAM GENE, encodes a VGAM119 precursor RNA, herein designated VGAM PRECURSOR RNA. Similar to other miRNA genes, and unlike most ordinary genes, VGAM119 precursor RNA, herein designated VGAM PRECURSOR RNA, does not encode a protein. A nucleotide sequence identical or highly similar to the nucleotide sequence of VGAM119 precursor RNA is designated SEQ ID:105, and is provided hereinbelow with reference to the sequence listing part. Nucleotide sequence SEQ ID: 105 is located at position 52159 relative to the genome of Vaccinia virus.

[1623] VGAM119 precursor RNA, herein designated VGAM PRECURSOR RNA, folds onto itself, forming VGAM119 folded precursor RNA, herein designated VGAM FOLDED PRECURSOR RNA, which has a two-dimensional hairpin structure. As is well known in the art, this hairpin structure, is typical of RNA encoded by miRNA genes, and is due to the fact that the nucleotide sequence of the first half of the RNA encoded by a miRNA gene is an accurate or partial inversed-reversed sequence of the nucleotide sequence of the second half thereof.

[1624] An enzyme complex designated DICER COMPLEX, dices the VGAM119 folded precursor RNA, herein designated VGAM FOLDED PRECURSOR RNA, into VGAM119 RNA, herein designated VGAM RNA, a single stranded ˜22 nt long RNA segment. As is known in the art, dicing of a hairpin structured RNA precursor product into a short ˜22 nt RNA segment is catalyzed by an enzyme complex comprising an enzyme called Dicer together with other necessary proteins. A probable (over 81%) nucleotide sequence of VGAM119 RNA is designated SEQ ID:454, and is provided hereinbelow with reference to the sequence listing part.

[1625] VGAM119 host target gene, herein designated VGAM HOST TARGET GENE, encodes a corresponding messenger RNA, VGAM119 host target RNA, herein designated VGAM HOST TARGET RNA. VGAM119 host target RNA, herein designated VGAM HOST TARGET RNA, comprises three regions, as is typical of mRNA of a protein coding gene: a 5 untranslated region, a protein coding region and a 3 untranslated region, designated 5UTR, PROTEIN CODING and 3UTR respectively.

[1626] VGAM119 RNA, herein designated VGAM RNA, binds complementarily to one or more host target binding sites located in untranslated regions of VGAM119 host target RNA, herein designated VGAM HOST TARGET RNA. This complementary binding is due to the fact that the nucleotide sequence of VGAM119 RNA, herein designated VGAM RNA, is an accurate or a partial inversed-reversed sequence of the nucleotide sequence of each of the host target binding sites. As an illustration, FIG. 1 shows 3 such host target binding sites, designated BINDING SITE I, BINDING SITE II and BINDING SITE III respectively. It is appreciated that the number of host target binding sites shown in FIG. 1 is meant as an illustration only, and is not meant to be limiting VGAM119 RNA, herein designated VGAM RNA, may have a different number of host target binding sites in untranslated regions of a VGAM119 host target RNA, herein designated VGAM HOST TARGET RNA. It is further appreciated that while FIG. 1 depicts host target binding sites in the 3UTR region, this is meant as an example only these host target binding sites may be located in the 3UTR region, the 5UTR region, or in both 3UTR and 5UTR regions.

[1627] The complementary binding of VGAM119 RNA, herein designated VGAM RNA, to host target binding sites on VGAM119 host target RNA, herein designated VGAM HOST TARGET RNA, such as BINDING SITE I, BINDING SITE II and BINDING SITE III, inhibits translation of VGAM119 host target RNA, herein designated VGAM HOST TARGET RNA, into VGAM119 host target protein, herein designated VGAM HOST TARGET PROTEIN. VGAM host target protein is therefore outlined by a broken line.

[1628] It is appreciated that VGAM119 host target gene, herein designated VGAM HOST TARGET GENE, in fact represents a plurality of VGAM119 host target genes. The mRNA of each one of this plurality of VGAM119 host target genes comprises one or more host target binding sites, each having a nucleotide sequence which is at least partly complementary to VGAM119 RNA, herein designated VGAM RNA, and which when bound by VGAM119 RNA, herein designated VGAM RNA, causes inhibition of translation of respective one or more VGAM119 host target proteins.

[1629] It is further appreciated by one skilled in the art that the mode of translational inhibition illustrated by FIG. 1 with specific reference to translational inhibition exerted by VGAM119 gene, herein designated VGAM GENE, on one or more VGAM119 host target gene, herein designated VGAM HOST TARGET GENE, is in fact common to other known non-viral miRNA genes. As mentioned hereinabove with reference to the background section, although a specific complementary binding site has been demonstrated only for some of the known miRNA genes (primarily Lin-4 and Let-7), all other recently discovered miRNA genes are also believed by those skilled in the art to modulate expression of other genes by complementary binding, although specific complementary binding sites of these other miRNA genes have not yet been found (Ruvkun G., Perspective: Glimpses of a tiny RNA world, Science 294, 779 (2001)).

[1630] It is yet further appreciated that a function of VGAM119 is inhibition of expression of host target genes, as part of a novel viral mechanism of attacking a host. Accordingly, utilities of VGAM119 include diagnosis, prevention and treatment of viral infection by Vaccinia virus. Specific functions, and accordingly utilities, of VGAM119 correlate with, and may be deduced from, the identity of the host target genes which VGAM119 binds and inhibits, and the function of these host target genes, as elaborated hereinbelow.

[1631] Nucleotide sequences of the VGAM119 precursor RNA, herein designated VGAM PRECURSOR RNA, and of the diced VGAM119 RNA, herein designated VGAM RNA, and a schematic representation of the secondary folding of VGAM119 folded precursor RNA, herein designated VGAM FOLDED PRECURSOR RNA, of VGAM119 are further described hereinbelow with reference to Table 1.

[1632] Nucleotide sequences of host target binding sites, such as BINDING SITE-I, BINDING SITE-II and BINDING SITE-III of FIG. 1, found on, and schematic representation of the complementarity of each of these host target binding sites to VGAM119 RNA, herein designated VGAM RNA, are described hereinbelow with reference to Table 2.

[1633] FIG. 1 further provides a conceptual description of another novel bioinformatically detected viral gene of the present invention, referred to here as Viral Genomic Address Messenger 120 (VGAM120) viral gene, which modulates expression of respective host target genes thereof, the function and utility of which host target genes is known in the art.

[1634] VGAM120 is a novel bioinformatically detected regulatory, non protein coding, viral micro RNA (miRNA) gene. The method by which VGAM120 was detected is described hereinabove with reference to FIGS. 2-8.

[1635] VGAM120 gene, herein designated VGAM GENE, is a viral gene contained in the genome of Vaccinia virus. VGAM120 host target gene, herein designated VGAM HOST TARGET GENE, is a human gene contained in the human genome.

[1636] VGAM120 gene, herein designated VGAM GENE, encodes a VGAM120 precursor RNA, herein designated VGAM PRECURSOR RNA. Similar to other miRNA genes, and unlike most ordinary genes, VGAM120 precursor RNA, herein designated VGAM PRECURSOR RNA, does not encode a protein. A nucleotide sequence identical or highly similar to the nucleotide sequence of VGAM120 precursor RNA is designated SEQ ID:106, and is provided hereinbelow with reference to the sequence listing part. Nucleotide sequence SEQ ID: 106 is located at position 50332 relative to the genome of Vaccinia virus.

[1637] VGAM120 precursor RNA, herein designated VGAM PRECURSOR RNA, folds onto itself, forming VGAM120 folded precursor RNA, herein designated VGAM FOLDED PRECURSOR RNA, which has a two-dimensional hairpin structure. As is well known in the art, this hairpin structure, is typical of RNA encoded by miRNA genes, and is due to the fact that the nucleotide sequence of the first half of the RNA encoded by a miRNA gene is an accurate or partial inversed-reversed sequence of the nucleotide sequence of the second half thereof.

[1638] An enzyme complex designated DICER COMPLEX, dices the VGAM120 folded precursor RNA, herein designated VGAM FOLDED PRECURSOR RNA, into VGAM120 RNA, herein designated VGAM RNA, a single stranded ˜22 nt long RNA segment. As is known in the art, dicing of a hairpin structured RNA precursor product into a short ˜22 nt RNA segment is catalyzed by an enzyme complex comprising an enzyme called Dicer together with other necessary proteins. A probable (over 91%) nucleotide sequence of VGAM120 RNA is designated SEQ ID:455, and is provided hereinbelow with reference to the sequence listing part.

[1639] VGAM120 host target gene, herein designated VGAM HOST TARGET GENE, encodes a corresponding messenger RNA, VGAM120 host target RNA, herein designated VGAM HOST TARGET RNA. VGAM120 host target RNA, herein designated VGAM HOST TARGET RNA, comprises three regions, as is typical of mRNA of a protein coding gene: a 5 untranslated region, a protein coding region and a 3 untranslated region, designated 5UTR, PROTEIN CODING and 3UTR respectively.

[1640] VGAM120 RNA, herein designated VGAM RNA, binds complementarily to one or more host target binding sites located in untranslated regions of VGAM120 host target RNA, herein designated VGAM HOST TARGET RNA. This complementary binding is due to the fact that the nucleotide sequence of VGAM120 RNA, herein designated VGAM RNA, is an accurate or a partial inversed-reversed sequence of the nucleotide sequence of each of the host target binding sites. As an illustration, FIG. 1 shows 3 such host target binding sites, designated BINDING SITE I, BINDING SITE II and BINDING SITE III respectively. It is appreciated that the number of host target binding sites shown in FIG. 1 is meant as an illustration only, and is not meant to be limiting VGAM120 RNA, herein designated VGAM RNA, may have a different number of host target binding sites in untranslated regions of a VGAM120 host target RNA, herein designated VGAM HOST TARGET RNA. It is further appreciated that while FIG. 1 depicts host target binding sites in the 3UTR region, this is meant as an example only these host target binding sites may be located in the 3UTR region, the 5UTR region, or in both 3UTR and 5UTR regions.

[1641] The complementary binding of VGAM120 RNA, herein designated VGAM RNA, to host target binding sites on VGAM120 host target RNA, herein designated VGAM HOST TARGET RNA, such as BINDING SITE I, BINDING SITE II and BINDING SITE III, inhibits translation of VGAM120 host target RNA, herein designated VGAM HOST TARGET RNA, into VGAM120 host target protein, herein designated VGAM HOST TARGET PROTEIN. VGAM host target protein is therefore outlined by a broken line.

[1642] It is appreciated that VGAM120 host target gene, herein designated VGAM HOST TARGET GENE, in fact represents a plurality of VGAM120 host target genes. The mRNA of each one of this plurality of VGAM120 host target genes comprises one or more host target binding sites, each having a nucleotide sequence which is at least partly complementary to VGAM120 RNA, herein designated VGAM RNA, and which when bound by VGAM120 RNA, herein designated VGAM RNA, causes inhibition of translation of respective one or more VGAM120 host target proteins.

[1643] It is further appreciated by one skilled in the art that the mode of translational inhibition illustrated by FIG. 1 with specific reference to translational inhibition exerted by VGAM120 gene, herein designated VGAM GENE, on one or more VGAM120 host target gene, herein designated VGAM HOST TARGET GENE, is in fact common to other known non-viral miRNA genes. As mentioned hereinabove with reference to the background section, although a specific complementary binding site has been demonstrated only for some of the known miRNA genes (primarily Lin-4 and Let-7), all other recently discovered miRNA genes are also believed by those skilled in the art to modulate expression of other genes by complementary binding, although specific complementary binding sites of these other miRNA genes have not yet been found (Ruvkun G., Perspective: Glimpses of a tiny RNA world, Science 294, 779 (2001)).

[1644] It is yet further appreciated that a function of VGAM120 is inhibition of expression of host target genes, as part of a novel viral mechanism of attacking a host. Accordingly, utilities of VGAM120 include diagnosis, prevention and treatment of viral infection by Vaccinia virus. Specific functions, and accordingly utilities, of VGAM120 correlate with, and may be deduced from, the identity of the host target genes which VGAM120 binds and inhibits, and the function of these host target genes, as elaborated hereinbelow.

[1645] Nucleotide sequences of the VGAM120 precursor RNA, herein designated VGAM PRECURSOR RNA, and of the diced VGAM120 RNA, herein designated VGAM RNA, and a schematic representation of the secondary folding of VGAM120 folded precursor RNA, herein designated VGAM FOLDED PRECURSOR RNA, of VGAM120 are further described hereinbelow with reference to Table 1.

[1646] Nucleotide sequences of host target binding sites, such as BINDING SITE-I, BINDING SITE-II and BINDING SITE-III of FIG. 1, found on, and schematic representation of the complementarity of each of these host target binding sites to VGAM120 RNA, herein designated VGAM RNA, are described hereinbelow with reference to Table 2.

[1647] FIG. 1 further provides a conceptual description of another novel bioinformatically detected viral gene of the present invention, referred to here as Viral Genomic Address Messenger 121 (VGAM121) viral gene, which modulates expression of respective host target genes thereof, the function and utility of which host target genes is known in the art.

[1648] VGAM121 is a novel bioinformatically detected regulatory, non protein coding, viral micro RNA (miRNA) gene. The method by which VGAM121 was detected is described hereinabove with reference to FIGS. 2-8.

[1649] VGAM121 gene, herein designated VGAM GENE, is a viral gene contained in the genome of Vaccinia virus. VGAM121 host target gene, herein designated VGAM HOST TARGET GENE, is a human gene contained in the human genome.

[1650] VGAM121 gene, herein designated VGAM GENE, encodes a VGAM121 precursor RNA, herein designated VGAM PRECURSOR RNA. Similar to other miRNA genes, and unlike most ordinary genes, VGAM121 precursor RNA, herein designated VGAM PRECURSOR RNA, does not encode a protein. A nucleotide sequence identical or highly similar to the nucleotide sequence of VGAM121 precursor RNA is designated SEQ ID:107, and is provided hereinbelow with reference to the sequence listing part. Nucleotide sequence SEQ ID: 107 is located at position 47859 relative to the genome of Vaccinia virus.

[1651] VGAM121 precursor RNA, herein designated VGAM PRECURSOR RNA, folds onto itself, forming VGAM121 folded precursor RNA, herein designated VGAM FOLDED PRECURSOR RNA, which has a two-dimensional hairpin structure. As is well known in the art, this hairpin structure, is typical of RNA encoded by miRNA genes, and is due to the fact that the nucleotide sequence of the first half of the RNA encoded by a miRNA gene is an accurate or partial inversed-reversed sequence of the nucleotide sequence of the second half thereof.

[1652] An enzyme complex designated DICER COMPLEX, dices the VGAM121 folded precursor RNA, herein designated VGAM FOLDED PRECURSOR RNA, into VGAM121 RNA, herein designated VGAM RNA, a single stranded ˜22 nt long RNA segment. As is known in the art, dicing of a hairpin structured RNA precursor product into a short ˜22 nt RNA segment is catalyzed by an enzyme complex comprising an enzyme called Dicer together with other necessary proteins. A probable (over 79%) nucleotide sequence of VGAM121 RNA is designated SEQ ID:456, and is provided hereinbelow with reference to the sequence listing part.

[1653] VGAM121 host target gene, herein designated VGAM HOST TARGET GENE, encodes a corresponding messenger RNA, VGAM121 host target RNA, herein designated VGAM HOST TARGET RNA. VGAM121 host target RNA, herein designated VGAM HOST TARGET RNA, comprises three regions, as is typical of mRNA of a protein coding gene: a 5 untranslated region, a protein coding region and a 3 untranslated region, designated 5UTR, PROTEIN CODING and 3UTR respectively.

[1654] VGAM121 RNA, herein designated VGAM RNA, binds complementarily to one or more host target binding sites located in untranslated regions of VGAM121 host target RNA, herein designated VGAM HOST TARGET RNA. This complementary binding is due to the fact that the nucleotide sequence of VGAM121 RNA, herein designated VGAM RNA, is an accurate or a partial inversed-reversed sequence of the nucleotide sequence of each of the host target binding sites. As an illustration, FIG. 1 shows 3 such host target binding sites, designated BINDING SITE I, BINDING SITE II and BINDING SITE III respectively. It is appreciated that the number of host target binding sites shown in FIG. 1 is meant as an illustration only, and is not meant to be limiting VGAM121 RNA, herein designated VGAM RNA, may have a different number of host target binding sites in untranslated regions of a VGAM121 host target RNA, herein designated VGAM HOST TARGET RNA. It is further appreciated that while FIG. 1 depicts host target binding sites in the 3UTR region, this is meant as an example only these host target binding sites may be located in the 3UTR region, the 5UTR region, or in both 3UTR and 5UTR regions.

[1655] The complementary binding of VGAM121 RNA, herein designated VGAM RNA, to host target binding sites on VGAM121 host target RNA, herein designated VGAM HOST TARGET RNA, such as BINDING SITE I, BINDING SITE II and BINDING SITE III, inhibits translation of VGAM121 host target RNA, herein designated VGAM HOST TARGET RNA, into VGAM121 host target protein, herein designated VGAM HOST TARGET PROTEIN. VGAM host target protein is therefore outlined by a broken line.

[1656] It is appreciated that VGAM121 host target gene, herein designated VGAM HOST TARGET GENE, in fact represents a plurality of VGAM121 host target genes. The mRNA of each one of this plurality of VGAM121 host target genes comprises one or more host target binding sites, each having a nucleotide sequence which is at least partly complementary to VGAM121 RNA, herein designated VGAM RNA, and which when bound by VGAM121 RNA, herein designated VGAM RNA, causes inhibition of translation of respective one or more VGAM121 host target proteins.

[1657] It is further appreciated by one skilled in the art that the mode of translational inhibition illustrated by FIG. 1 with specific reference to translational inhibition exerted by VGAM121 gene, herein designated VGAM GENE, on one or more VGAM121 host target gene, herein designated VGAM HOST TARGET GENE, is in fact common to other known non-viral miRNA genes. As mentioned hereinabove with reference to the background section, although a specific complementary binding site has been demonstrated only for some of the known miRNA genes (primarily Lin-4 and Let-7), all other recently discovered miRNA genes are also believed by those skilled in the art to modulate expression of other genes by complementary binding, although specific complementary binding sites of these other miRNA genes have not yet been found (Ruvkun G., Perspective: Glimpses of a tiny RNA world, Science 294, 779 (2001)).

[1658] It is yet further appreciated that a function of VGAM121 is inhibition of expression of host target genes, as part of a novel viral mechanism of attacking a host. Accordingly, utilities of VGAM121 include diagnosis, prevention and treatment of viral infection by Vaccinia virus. Specific functions, and accordingly utilities, of VGAM121 correlate with, and may be deduced from, the identity of the host target genes which VGAM121 binds and inhibits, and the function of these host target genes, as elaborated hereinbelow.

[1659] Nucleotide sequences of the VGAM121 precursor RNA, herein designated VGAM PRECURSOR RNA, and of the diced VGAM121 RNA, herein designated VGAM RNA, and a schematic representation of the secondary folding of VGAM121 folded precursor RNA, herein designated VGAM FOLDED PRECURSOR RNA, of VGAM121 are further described hereinbelow with reference to Table 1.

[1660] Nucleotide sequences of host target binding sites, such as BINDING SITE-I, BINDING SITE-II and BINDING SITE-III of FIG. 1, found on, and schematic representation of the complementarity of each of these host target binding sites to VGAM121 RNA, herein designated VGAM RNA, are described hereinbelow with reference to Table 2.

[1661] FIG. 1 further provides a conceptual description of another novel bioinformatically detected viral gene of the present invention, referred to here as Viral Genomic Address Messenger 122 (VGAM122) viral gene, which modulates expression of respective host target genes thereof, the function and utility of which host target genes is known in the art.

[1662] VGAM122 is a novel bioinformatically detected regulatory, non protein coding, viral micro RNA (miRNA) gene. The method by which VGAM122 was detected is described hereinabove with reference to FIGS. 2-8.

[1663] VGAM122 gene, herein designated VGAM GENE, is a viral gene contained in the genome of Vaccinia virus. VGAM122 host target gene, herein designated VGAM HOST TARGET GENE, is a human gene contained in the human genome.

[1664] VGAM122 gene, herein designated VGAM GENE, encodes a VGAM122 precursor RNA, herein designated VGAM PRECURSOR RNA. Similar to other miRNA genes, and unlike most ordinary genes, VGAM122 precursor RNA, herein designated VGAM PRECURSOR RNA, does not encode a protein. A nucleotide sequence identical or highly similar to the nucleotide sequence of VGAM122 precursor RNA is designated SEQ ID:108, and is provided hereinbelow with reference to the sequence listing part. Nucleotide sequence SEQ ID: 108 is located at position 50837 relative to the genome of Vaccinia virus.

[1665] VGAM122 precursor RNA, herein designated VGAM PRECURSOR RNA, folds onto itself, forming VGAM122 folded precursor RNA, herein designated VGAM FOLDED PRECURSOR RNA, which has a two-dimensional hairpin structure. As is well known in the art, this hairpin structure, is typical of RNA encoded by miRNA genes, and is due to the fact that the nucleotide sequence of the first half of the RNA encoded by a miRNA gene is an accurate or partial inversed-reversed sequence of the nucleotide sequence of the second half thereof.

[1666] An enzyme complex designated DICER COMPLEX, dices the VGAM122 folded precursor RNA, herein designated VGAM FOLDED PRECURSOR RNA, into VGAM122 RNA, herein designated VGAM RNA, a single stranded ˜22 nt long RNA segment. As is known in the art, dicing of a hairpin structured RNA precursor product into a short ˜22 nt RNA segment is catalyzed by an enzyme complex comprising an enzyme called Dicer together with other necessary proteins. A probable (over 82%) nucleotide sequence of VGAM122 RNA is designated SEQ ID:457, and is provided hereinbelow with reference to the sequence listing part.

[1667] VGAM122 host target gene, herein designated VGAM HOST TARGET GENE, encodes a corresponding messenger RNA, VGAM122 host target RNA, herein designated VGAM HOST TARGET RNA. VGAM122 host target RNA, herein designated VGAM HOST TARGET RNA, comprises three regions, as is typical of mRNA of a protein coding gene: a 5 untranslated region, a protein coding region and a 3 untranslated region, designated 5UTR, PROTEIN CODING and 3UTR respectively.

[1668] VGAM122 RNA, herein designated VGAM RNA, binds complementarily to one or more host target binding sites located in untranslated regions of VGAM122 host target RNA, herein designated VGAM HOST TARGET RNA. This complementary binding is due to the fact that the nucleotide sequence of VGAM122 RNA, herein designated VGAM RNA, is an accurate or a partial inversed-reversed sequence of the nucleotide sequence of each of the host target binding sites. As an illustration, FIG. 1 shows 3 such host target binding sites, designated BINDING SITE I, BINDING SITE II and BINDING SITE III respectively. It is appreciated that the number of host target binding sites shown in FIG. 1 is meant as an illustration only, and is not meant to be limiting VGAM122 RNA, herein designated VGAM RNA, may have a different number of host target binding sites in untranslated regions of a VGAM122 host target RNA, herein designated VGAM HOST TARGET RNA. It is further appreciated that while FIG. 1 depicts host target binding sites in the 3UTR region, this is meant as an example only these host target binding sites may be located in the 3UTR region, the 5UTR region, or in both 3UTR and 5UTR regions.

[1669] The complementary binding of VGAM122 RNA, herein designated VGAM RNA, to host target binding sites on VGAM122 host target RNA, herein designated VGAM HOST TARGET RNA, such as BINDING SITE I, BINDING SITE II and BINDING SITE III, inhibits translation of VGAM122 host target RNA, herein designated VGAM HOST TARGET RNA, into VGAM122 host target protein, herein designated VGAM HOST TARGET PROTEIN. VGAM host target protein is therefore outlined by a broken line.

[1670] It is appreciated that VGAM122 host target gene, herein designated VGAM HOST TARGET GENE, in fact represents a plurality of VGAM122 host target genes. The mRNA of each one of this plurality of VGAM122 host target genes comprises one or more host target binding sites, each having a nucleotide sequence which is at least partly complementary to VGAM122 RNA, herein designated VGAM RNA, and which when bound by VGAM122 RNA, herein designated VGAM RNA, causes inhibition of translation of respective one or more VGAM122 host target proteins.

[1671] It is further appreciated by one skilled in the art that the mode of translational inhibition illustrated by FIG. 1 with specific reference to translational inhibition exerted by VGAM122 gene, herein designated VGAM GENE, on one or more VGAM122 host target gene, herein designated VGAM HOST TARGET GENE, is in fact common to other known non-viral miRNA genes. As mentioned hereinabove with reference to the background section, although a specific complementary binding site has been demonstrated only for some of the known miRNA genes (primarily Lin-4 and Let-7), all other recently discovered miRNA genes are also believed by those skilled in the art to modulate expression of other genes by complementary binding, although specific complementary binding sites of these other miRNA genes have not yet been found (Ruvkun G., Perspective: Glimpses of a tiny RNA world, Science 294, 779 (2001)).

[1672] It is yet further appreciated that a function of VGAM122 is inhibition of expression of host target genes, as part of a novel viral mechanism of attacking a host. Accordingly, utilities of VGAM122 include diagnosis, prevention and treatment of viral infection by Vaccinia virus. Specific functions, and accordingly utilities, of VGAM122 correlate with, and may be deduced from, the identity of the host target genes which VGAM122 binds and inhibits, and the function of these host target genes, as elaborated hereinbelow.

[1673] Nucleotide sequences of the VGAM122 precursor RNA, herein designated VGAM PRECURSOR RNA, and of the diced VGAM122 RNA, herein designated VGAM RNA, and a schematic representation of the secondary folding of VGAM122 folded precursor RNA, herein designated VGAM FOLDED PRECURSOR RNA, of VGAM122 are further described hereinbelow with reference to Table 1.

[1674] Nucleotide sequences of host target binding sites, such as BINDING SITE-I, BINDING SITE-II and BINDING SITE-III of FIG. 1, found on, and schematic representation of the complementarity of each of these host target binding sites to VGAM122 RNA, herein designated VGAM RNA, are described hereinbelow with reference to Table 2.

[1675] FIG. 1 further provides a conceptual description of another novel bioinformatically detected viral gene of the present invention, referred to here as Viral Genomic Address Messenger 123 (VGAM123) viral gene, which modulates expression of respective host target genes thereof, the function and utility of which host target genes is known in the art.

[1676] VGAM123 is a novel bioinformatically detected regulatory, non protein coding, viral micro RNA (miRNA) gene. The method by which VGAM123 was detected is described hereinabove with reference to FIGS. 2-8.

[1677] VGAM123 gene, herein designated VGAM GENE, is a viral gene contained in the genome of Vaccinia virus. VGAM123 host target gene, herein designated VGAM HOST TARGET GENE, is a human gene contained in the human genome.

[1678] VGAM123 gene, herein designated VGAM GENE, encodes a VGAM123 precursor RNA, herein designated VGAM PRECURSOR RNA. Similar to other miRNA genes, and unlike most ordinary genes, VGAM123 precursor RNA, herein designated VGAM PRECURSOR RNA, does not encode a protein. A nucleotide sequence identical or highly similar to the nucleotide sequence of VGAM123 precursor RNA is designated SEQ ID:109, and is provided hereinbelow with reference to the sequence listing part. Nucleotide sequence SEQ ID: 109 is located at position 52454 relative to the genome of Vaccinia virus.

[1679] VGAM123 precursor RNA, herein designated VGAM PRECURSOR RNA, folds onto itself, forming VGAM123 folded precursor RNA, herein designated VGAM FOLDED PRECURSOR RNA, which has a two-dimensional hairpin structure. As is well known in the art, this hairpin structure, is typical of RNA encoded by miRNA genes, and is due to the fact that the nucleotide sequence of the first half of the RNA encoded by a miRNA gene is an accurate or partial inversed-reversed sequence of the nucleotide sequence of the second half thereof.

[1680] An enzyme complex designated DICER COMPLEX, dices the VGAM123 folded precursor RNA, herein designated VGAM FOLDED PRECURSOR RNA, into VGAM123 RNA, herein designated VGAM RNA, a single stranded ˜22 nt long RNA segment. As is known in the art, dicing of a hairpin structured RNA precursor product into a short ˜22 nt RNA segment is catalyzed by an enzyme complex comprising an enzyme called Dicer together with other necessary proteins. A probable (over 76%) nucleotide sequence of VGAM123 RNA is designated SEQ ID:458, and is provided hereinbelow with reference to the sequence listing part.

[1681] VGAM123 host target gene, herein designated VGAM HOST TARGET GENE, encodes a corresponding messenger RNA, VGAM123 host target RNA, herein designated VGAM HOST TARGET RNA. VGAM123 host target RNA, herein designated VGAM HOST TARGET RNA, comprises three regions, as is typical of mRNA of a protein coding gene: a 5 untranslated region, a protein coding region and a 3 untranslated region, designated 5UTR, PROTEIN CODING and 3UTR respectively.

[1682] VGAM123 RNA, herein designated VGAM RNA, binds complementarily to one or more host target binding sites located in untranslated regions of VGAM123 host target RNA, herein designated VGAM HOST TARGET RNA. This complementary binding is due to the fact that the nucleotide sequence of VGAM123 RNA, herein designated VGAM RNA, is an accurate or a partial inversed-reversed sequence of the nucleotide sequence of each of the host target binding sites. As an illustration, FIG. 1 shows 3 such host target binding sites, designated BINDING SITE I, BINDING SITE II and BINDING SITE III respectively. It is appreciated that the number of host target binding sites shown in FIG. 1 is meant as an illustration only, and is not meant to be limiting VGAM123 RNA, herein designated VGAM RNA, may have a different number of host target binding sites in untranslated regions of a VGAM123 host target RNA, herein designated VGAM HOST TARGET RNA. It is further appreciated that while FIG. 1 depicts host target binding sites in the 3UTR region, this is meant as an example only these host target binding sites may be located in the 3UTR region, the 5UTR region, or in both 3UTR and 5UTR regions.

[1683] The complementary binding of VGAM123 RNA, herein designated VGAM RNA, to host target binding sites on VGAM123 host target RNA, herein designated VGAM HOST TARGET RNA, such as BINDING SITE I, BINDING SITE II and BINDING SITE III, inhibits translation of VGAM123 host target RNA, herein designated VGAM HOST TARGET RNA, into VGAM123 host target protein, herein designated VGAM HOST TARGET PROTEIN. VGAM host target protein is therefore outlined by a broken line.

[1684] It is appreciated that VGAM123 host target gene, herein designated VGAM HOST TARGET GENE, in fact represents a plurality of VGAM123 host target genes. The mRNA of each one of this plurality of VGAM123 host target genes comprises one or more host target binding sites, each having a nucleotide sequence which is at least partly complementary to VGAM123 RNA, herein designated VGAM RNA, and which when bound by VGAM123 RNA, herein designated VGAM RNA, causes inhibition of translation of respective one or more VGAM123 host target proteins.

[1685] It is further appreciated by one skilled in the art that the mode of translational inhibition illustrated by FIG. 1 with specific reference to translational inhibition exerted by VGAM123 gene, herein designated VGAM GENE, on one or more VGAM123 host target gene, herein designated VGAM HOST TARGET GENE, is in fact common to other known non-viral miRNA genes. As mentioned hereinabove with reference to the background section, although a specific complementary binding site has been demonstrated only for some of the known miRNA genes (primarily Lin-4 and Let-7), all other recently discovered miRNA genes are also believed by those skilled in the art to modulate expression of other genes by complementary binding, although specific complementary binding sites of these other miRNA genes have not yet been found (Ruvkun G., Perspective: Glimpses of a tiny RNA world, Science 294, 779 (2001)).

[1686] It is yet further appreciated that a function of VGAM123 is inhibition of expression of host target genes, as part of a novel viral mechanism of attacking a host. Accordingly, utilities of VGAM123 include diagnosis, prevention and treatment of viral infection by Vaccinia virus. Specific functions, and accordingly utilities, of VGAM123 correlate with, and may be deduced from, the identity of the host target genes which VGAM123 binds and inhibits, and the function of these host target genes, as elaborated hereinbelow.

[1687] Nucleotide sequences of the VGAM123 precursor RNA, herein designated VGAM PRECURSOR RNA, and of the diced VGAM123 RNA, herein designated VGAM RNA, and a schematic representation of the secondary folding of VGAM123 folded precursor RNA, herein designated VGAM FOLDED PRECURSOR RNA, of VGAM123 are further described hereinbelow with reference to Table 1.

[1688] Nucleotide sequences of host target binding sites, such as BINDING SITE-I, BINDING SITE-II and BINDING SITE-III of FIG. 1, found on, and schematic representation of the complementarity of each of these host target binding sites to VGAM123 RNA, herein designated VGAM RNA, are described hereinbelow with reference to Table 2.

[1689] FIG. 1 further provides a conceptual description of another novel bioinformatically detected viral gene of the present invention, referred to here as Viral Genomic Address Messenger 124 (VGAM124) viral gene, which modulates expression of respective host target genes thereof, the function and utility of which host target genes is known in the art.

[1690] VGAM124 is a novel bioinformatically detected regulatory, non protein coding, viral micro RNA (miRNA) gene. The method by which VGAM124 was detected is described hereinabove with reference to FIGS. 2-8.

[1691] VGAM124 gene, herein designated VGAM GENE, is a viral gene contained in the genome of Vaccinia virus. VGAM124 host target gene, herein designated VGAM HOST TARGET GENE, is a human gene contained in the human genome.

[1692] VGAM124 gene, herein designated VGAM GENE, encodes a VGAM124 precursor RNA, herein designated VGAM PRECURSOR RNA. Similar to other miRNA genes, and unlike most ordinary genes, VGAM124 precursor RNA, herein designated VGAM PRECURSOR RNA, does not encode a protein. A nucleotide sequence identical or highly similar to the nucleotide sequence of VGAM124 precursor RNA is designated SEQ ID:110, and is provided hereinbelow with reference to the sequence listing part. Nucleotide sequence SEQ ID:110 is located at position 52549 relative to the genome of Vaccinia virus.

[1693] VGAM124 precursor RNA, herein designated VGAM PRECURSOR RNA, folds onto itself, forming VGAM124 folded precursor RNA, herein designated VGAM FOLDED PRECURSOR RNA, which has a two-dimensional hairpin structure. As is well known in the art, this hairpin structure, is typical of RNA encoded by miRNA genes, and is due to the fact that the nucleotide sequence of the first half of the RNA encoded by a miRNA gene is an accurate or partial inversed-reversed sequence of the nucleotide sequence of the second half thereof.

[1694] An enzyme complex designated DICER COMPLEX, dices the VGAM124 folded precursor RNA, herein designated VGAM FOLDED PRECURSOR RNA, into VGAM124 RNA, herein designated VGAM RNA, a single stranded ˜22 nt long RNA segment. As is known in the art, dicing of a hairpin structured RNA precursor product into a short ˜22 nt RNA segment is catalyzed by an enzyme complex comprising an enzyme called Dicer together with other necessary proteins. A probable (over 77%) nucleotide sequence of VGAM124 RNA is designated SEQ ID:459, and is provided hereinbelow with reference to the sequence listing part.

[1695] VGAM124 host target gene, herein designated VGAM HOST TARGET GENE, encodes a corresponding messenger RNA, VGAM124 host target RNA, herein designated VGAM HOST TARGET RNA. VGAM124 host target RNA, herein designated VGAM HOST TARGET RNA, comprises three regions, as is typical of mRNA of a protein coding gene: a 5 untranslated region, a protein coding region and a 3 untranslated region, designated 5UTR, PROTEIN CODING and 3UTR respectively.

[1696] VGAM124 RNA, herein designated VGAM RNA, binds complementarily to one or more host target binding sites located in untranslated regions of VGAM124 host target RNA, herein designated VGAM HOST TARGET RNA. This complementary binding is due to the fact that the nucleotide sequence of VGAM124 RNA, herein designated VGAM RNA, is an accurate or a partial inversed-reversed sequence of the nucleotide sequence of each of the host target binding sites. As an illustration, FIG. 1 shows 3 such host target binding sites, designated BINDING SITE I, BINDING SITE II and BINDING SITE III respectively. It is appreciated that the number of host target binding sites shown in FIG. 1 is meant as an illustration only, and is not meant to be limiting VGAM124 RNA, herein designated VGAM RNA, may have a different number of host target binding sites in untranslated regions of a VGAM124 host target RNA, herein designated VGAM HOST TARGET RNA. It is further appreciated that while FIG. 1 depicts host target binding sites in the 3UTR region, this is meant as an example only these host target binding sites may be located in the 3UTR region, the 5UTR region, or in both 3UTR and 5UTR regions.

[1697] The complementary binding of VGAM124 RNA, herein designated VGAM RNA, to host target binding sites on VGAM124 host target RNA, herein designated VGAM HOST TARGET RNA, such as BINDING SITE I, BINDING SITE II and BINDING SITE III, inhibits translation of VGAM124 host target RNA, herein designated VGAM HOST TARGET RNA, into VGAM124 host target protein, herein designated VGAM HOST TARGET PROTEIN. VGAM host target protein is therefore outlined by a broken line.

[1698] It is appreciated that VGAM124 host target gene, herein designated VGAM HOST TARGET GENE, in fact represents a plurality of VGAM124 host target genes. The mRNA of each one of this plurality of VGAM124 host target genes comprises one or more host target binding sites, each having a nucleotide sequence which is at least partly complementary to VGAM124 RNA, herein designated VGAM RNA, and which when bound by VGAM124 RNA, herein designated VGAM RNA, causes inhibition of translation of respective one or more VGAM124 host target proteins.

[1699] It is further appreciated by one skilled in the art that the mode of translational inhibition illustrated by FIG. 1 with specific reference to translational inhibition exerted by VGAM124 gene, herein designated VGAM GENE, on one or more VGAM124 host target gene, herein designated VGAM HOST TARGET GENE, is in fact common to other known non-viral miRNA genes. As mentioned hereinabove with reference to the background section, although a specific complementary binding site has been demonstrated only for some of the known miRNA genes (primarily Lin-4 and Let-7), all other recently discovered miRNA genes are also believed by those skilled in the art to modulate expression of other genes by complementary binding, although specific complementary binding sites of these other miRNA genes have not yet been found (Ruvkun G., Perspective: Glimpses of a tiny RNA world, Science 294, 779 (2001)).

[1700] It is yet further appreciated that a function of VGAM124 is inhibition of expression of host target genes, as part of a novel viral mechanism of attacking a host. Accordingly, utilities of VGAM124 include diagnosis, prevention and treatment of viral infection by Vaccinia virus. Specific functions, and accordingly utilities, of VGAM124 correlate with, and may be deduced from, the identity of the host target genes which VGAM124 binds and inhibits, and the function of these host target genes, as elaborated hereinbelow.

[1701] Nucleotide sequences of the VGAM124 precursor RNA, herein designated VGAM PRECURSOR RNA, and of the diced VGAM124 RNA, herein designated VGAM RNA, and a schematic representation of the secondary folding of VGAM124 folded precursor RNA, herein designated VGAM FOLDED PRECURSOR RNA, of VGAM124 are further described hereinbelow with reference to Table 1.

[1702] Nucleotide sequences of host target binding sites, such as BINDING SITE-I, BINDING SITE-II and BINDING SITE-III of FIG. 1, found on, and schematic representation of the complementarity of each of these host target binding sites to VGAM124 RNA, herein designated VGAM RNA, are described hereinbelow with reference to Table 2.

[1703] FIG. 1 further provides a conceptual description of another novel bioinformatically detected viral gene of the present invention, referred to here as Viral Genomic Address Messenger 125 (VGAM125) viral gene, which modulates expression of respective host target genes thereof, the function and utility of which host target genes is known in the art.

[1704] VGAM125 is a novel bioinformatically detected regulatory, non protein coding, viral micro RNA (miRNA) gene. The method by which VGAM125 was detected is described hereinabove with reference to FIGS. 2-8.

[1705] VGAM125 gene, herein designated VGAM GENE, is a viral gene contained in the genome of Vaccinia virus. VGAM125 host target gene, herein designated VGAM HOST TARGET GENE, is a human gene contained in the human genome.

[1706] VGAM125 gene, herein designated VGAM GENE, encodes a VGAM125 precursor RNA, herein designated VGAM PRECURSOR RNA. Similar to other miRNA genes, and unlike most ordinary genes, VGAM125 precursor RNA, herein designated VGAM PRECURSOR RNA, does not encode a protein. A nucleotide sequence identical or highly similar to the nucleotide sequence of VGAM125 precursor RNA is designated SEQ ID: 111, and is provided hereinbelow with reference to the sequence listing part. Nucleotide sequence SEQ ID:111 is located at position 55395 relative to the genome of Vaccinia virus.

[1707] VGAM125 precursor RNA, herein designated VGAM PRECURSOR RNA, folds onto itself, forming VGAM125 folded precursor RNA, herein designated VGAM FOLDED PRECURSOR RNA, which has a two-dimensional hairpin structure. As is well known in the art, this hairpin structure, is typical of RNA encoded by miRNA genes, and is due to the fact that the nucleotide sequence of the first half of the RNA encoded by a miRNA gene is an accurate or partial inversed-reversed sequence of the nucleotide sequence of the second half thereof.

[1708] An enzyme complex designated DICER COMPLEX, dices the VGAM125 folded precursor RNA, herein designated VGAM FOLDED PRECURSOR RNA, into VGAM125 RNA, herein designated VGAM RNA, a single stranded ˜22 nt long RNA segment. As is known in the art, dicing of a hairpin structured RNA precursor product into a short ˜22 nt RNA segment is catalyzed by an enzyme complex comprising an enzyme called Dicer together with other necessary proteins. A probable (over 91%) nucleotide sequence of VGAM125 RNA is designated SEQ ID:460, and is provided hereinbelow with reference to the sequence listing part.

[1709] VGAM125 host target gene, herein designated VGAM HOST TARGET GENE, encodes a corresponding messenger RNA, VGAM125 host target RNA, herein designated VGAM HOST TARGET RNA. VGAM125 host target RNA, herein designated VGAM HOST TARGET RNA, comprises three regions, as is typical of mRNA of a protein coding gene: a 5 untranslated region, a protein coding region and a 3 untranslated region, designated 5UTR, PROTEIN CODING and 3UTR respectively.

[1710] VGAM125 RNA, herein designated VGAM RNA, binds complementarily to one or more host target binding sites located in untranslated regions of VGAM125 host target RNA, herein designated VGAM HOST TARGET RNA. This complementary binding is due to the fact that the nucleotide sequence of VGAM125 RNA, herein designated VGAM RNA, is an accurate or a partial inversed-reversed sequence of the nucleotide sequence of each of the host target binding sites. As an illustration, FIG. 1 shows 3 such host target binding sites, designated BINDING SITE I, BINDING SITE II and BINDING SITE III respectively. It is appreciated that the number of host target binding sites shown in FIG. 1 is meant as an illustration only, and is not meant to be limiting VGAM125 RNA, herein designated VGAM RNA, may have a different number of host target binding sites in untranslated regions of a VGAM125 host target RNA, herein designated VGAM HOST TARGET RNA. It is further appreciated that while FIG. 1 depicts host target binding sites in the 3UTR region, this is meant as an example only these host target binding sites may be located in the 3UTR region, the 5UTR region, or in both 3UTR and 5UTR regions.

[1711] The complementary binding of VGAM125 RNA, herein designated VGAM RNA, to host target binding sites on VGAM125 host target RNA, herein designated VGAM HOST TARGET RNA, such as BINDING SITE I, BINDING SITE II and BINDING SITE III, inhibits translation of VGAM125 host target RNA, herein designated VGAM HOST TARGET RNA, into VGAM125 host target protein, herein designated VGAM HOST TARGET PROTEIN. VGAM host target protein is therefore outlined by a broken line.

[1712] It is appreciated that VGAM125 host target gene, herein designated VGAM HOST TARGET GENE, in fact represents a plurality of VGAM125 host target genes. The mRNA of each one of this plurality of VGAM125 host target genes comprises one or more host target binding sites, each having a nucleotide sequence which is at least partly complementary to VGAM125 RNA, herein designated VGAM RNA, and which when bound by VGAM125 RNA, herein designated VGAM RNA, causes inhibition of translation of respective one or more VGAM125 host target proteins.

[1713] It is further appreciated by one skilled in the art that the mode of translational inhibition illustrated by FIG. 1 with specific reference to translational inhibition exerted by VGAM125 gene, herein designated VGAM GENE, on one or more VGAM125 host target gene, herein designated VGAM HOST TARGET GENE, is in fact common to other known non-viral miRNA genes. As mentioned hereinabove with reference to the background section, although a specific complementary binding site has been demonstrated only for some of the known miRNA genes (primarily Lin-4 and Let-7), all other recently discovered miRNA genes are also believed by those skilled in the art to modulate expression of other genes by complementary binding, although specific complementary binding sites of these other miRNA genes have not yet been found (Ruvkun G., Perspective: Glimpses of a tiny RNA world, Science 294, 779 (2001)).

[1714] It is yet further appreciated that a function of VGAM125 is inhibition of expression of host target genes, as part of a novel viral mechanism of attacking a host. Accordingly, utilities of VGAM125 include diagnosis, prevention and treatment of viral infection by Vaccinia virus. Specific functions, and accordingly utilities, of VGAM125 correlate with, and may be deduced from, the identity of the host target genes which VGAM125 binds and inhibits, and the function of these host target genes, as elaborated hereinbelow.

[1715] Nucleotide sequences of the VGAM125 precursor RNA, herein designated VGAM PRECURSOR RNA, and of the diced VGAM125 RNA, herein designated VGAM RNA, and a schematic representation of the secondary folding of VGAM125 folded precursor RNA, herein designated VGAM FOLDED PRECURSOR RNA, of VGAM125 are further described hereinbelow with reference to Table 1.

[1716] Nucleotide sequences of host target binding sites, such as BINDING SITE-I, BINDING SITE-II and BINDING SITE-III of FIG. 1, found on, and schematic representation of the complementarity of each of these host target binding sites to VGAM125 RNA, herein designated VGAM RNA, are described hereinbelow with reference to Table 2.

[1717] FIG. 1 further provides a conceptual description of another novel bioinformatically detected viral gene of the present invention, referred to here as Viral Genomic Address Messenger 126 (VGAM126) viral gene, which modulates expression of respective host target genes thereof, the function and utility of which host target genes is known in the art.

[1718] VGAM126 is a novel bioinformatically detected regulatory, non protein coding, viral micro RNA (miRNA) gene. The method by which VGAM126 was detected is described hereinabove with reference to FIGS. 2-8.

[1719] VGAM126 gene, herein designated VGAM GENE, is a viral gene contained in the genome of Vaccinia virus. VGAM126 host target gene, herein designated VGAM HOST TARGET GENE, is a human gene contained in the human genome.

[1720] VGAM126 gene, herein designated VGAM GENE, encodes a VGAM126 precursor RNA, herein designated VGAM PRECURSOR RNA. Similar to other miRNA genes, and unlike most ordinary genes, VGAM126 precursor RNA, herein designated VGAM PRECURSOR RNA, does not encode a protein. A nucleotide sequence identical or highly similar to the nucleotide sequence of VGAM126 precursor RNA is designated SEQ ID:112, and is provided hereinbelow with reference to the sequence listing part. Nucleotide sequence SEQ ID:112 is located at position 53786 relative to the genome of Vaccinia virus.

[1721] VGAM126 precursor RNA, herein designated VGAM PRECURSOR RNA, folds onto itself, forming VGAM126 folded precursor RNA, herein designated VGAM FOLDED PRECURSOR RNA, which has a two-dimensional hairpin structure. As is well known in the art, this hairpin structure, is typical of RNA encoded by miRNA genes, and is due to the fact that the nucleotide sequence of the first half of the RNA encoded by a miRNA gene is an accurate or partial inversed-reversed sequence of the nucleotide sequence of the second half thereof.

[1722] An enzyme complex designated DICER COMPLEX, dices the VGAM126 folded precursor RNA, herein designated VGAM FOLDED PRECURSOR RNA, into VGAM126 RNA, herein designated VGAM RNA, a single stranded ˜22 nt long RNA segment. As is known in the art, dicing of a hairpin structured RNA precursor product into a short ˜22 nt RNA segment is catalyzed by an enzyme complex comprising an enzyme called Dicer together with other necessary proteins. A probable (over 89%) nucleotide sequence of VGAM126 RNA is designated SEQ ID:461, and is provided hereinbelow with reference to the sequence listing part.

[1723] VGAM126 host target gene, herein designated VGAM HOST TARGET GENE, encodes a corresponding messenger RNA, VGAM126 host target RNA, herein designated VGAM HOST TARGET RNA. VGAM126 host target RNA, herein designated VGAM HOST TARGET RNA, comprises three regions, as is typical of mRNA of a protein coding gene: a 5 untranslated region, a protein coding region and a 3 untranslated region, designated 5UTR, PROTEIN CODING and 3UTR respectively.

[1724] VGAM126 RNA, herein designated VGAM RNA, binds complementarily to one or more host target binding sites located in untranslated regions of VGAM126 host target RNA, herein designated VGAM HOST TARGET RNA. This complementary binding is due to the fact that the nucleotide sequence of VGAM126 RNA, herein designated VGAM RNA, is an accurate or a partial inversed-reversed sequence of the nucleotide sequence of each of the host target binding sites. As an illustration, FIG. 1 shows 3 such host target binding sites, designated BINDING SITE I, BINDING SITE II and BINDING SITE III respectively. It is appreciated that the number of host target binding sites shown in FIG. 1 is meant as an illustration only, and is not meant to be limiting VGAM126 RNA, herein designated VGAM RNA, may have a different number of host target binding sites in untranslated regions of a VGAM126 host target RNA, herein designated VGAM HOST TARGET RNA. It is further appreciated that while FIG. 1 depicts host target binding sites in the 3UTR region, this is meant as an example only these host target binding sites may be located in the 3UTR region, the 5UTR region, or in both 3UTR and 5UTR regions.

[1725] The complementary binding of VGAM126 RNA, herein designated VGAM RNA, to host target binding sites on VGAM126 host target RNA, herein designated VGAM HOST TARGET RNA, such as BINDING SITE I, BINDING SITE II and BINDING SITE III, inhibits translation of VGAM126 host target RNA, herein designated VGAM HOST TARGET RNA, into VGAM126 host target protein, herein designated VGAM HOST TARGET PROTEIN. VGAM host target protein is therefore outlined by a broken line.

[1726] It is appreciated that VGAM126 host target gene, herein designated VGAM HOST TARGET GENE, in fact represents a plurality of VGAM126 host target genes. The mRNA of each one of this plurality of VGAM126 host target genes comprises one or more host target binding sites, each having a nucleotide sequence which is at least partly complementary to VGAM126 RNA, herein designated VGAM RNA, and which when bound by VGAM126 RNA, herein designated VGAM RNA, causes inhibition of translation of respective one or more VGAM126 host target proteins.

[1727] It is further appreciated by one skilled in the art that the mode of translational inhibition illustrated by FIG. 1 with specific reference to translational inhibition exerted by VGAM126 gene, herein designated VGAM GENE, on one or more VGAM126 host target gene, herein designated VGAM HOST TARGET GENE, is in fact common to other known non-viral miRNA genes. As mentioned hereinabove with reference to the background section, although a specific complementary binding site has been demonstrated only for some of the known miRNA genes (primarily Lin-4 and Let-7), all other recently discovered miRNA genes are also believed by those skilled in the art to modulate expression of other genes by complementary binding, although specific complementary binding sites of these other miRNA genes have not yet been found (Ruvkun G., Perspective: Glimpses of a tiny RNA world, Science 294, 779 (2001)).

[1728] It is yet further appreciated that a function of VGAM126 is inhibition of expression of host target genes, as part of a novel viral mechanism of attacking a host. Accordingly, utilities of VGAM126 include diagnosis, prevention and treatment of viral infection by Vaccinia virus. Specific functions, and accordingly utilities, of VGAM126 correlate with, and may be deduced from, the identity of the host target genes which VGAM126 binds and inhibits, and the function of these host target genes, as elaborated hereinbelow.

[1729] Nucleotide sequences of the VGAM126 precursor RNA, herein designated VGAM PRECURSOR RNA, and of the diced VGAM126 RNA, herein designated VGAM RNA, and a schematic representation of the secondary folding of VGAM126 folded precursor RNA, herein designated VGAM FOLDED PRECURSOR RNA, of VGAM126 are further described hereinbelow with reference to Table 1.

[1730] Nucleotide sequences of host target binding sites, such as BINDING SITE-I, BINDING SITE-II and BINDING SITE-III of FIG. 1, found on, and schematic representation of the complementarity of each of these host target binding sites to VGAM126 RNA, herein designated VGAM RNA, are described hereinbelow with reference to Table 2.

[1731] FIG. 1 further provides a conceptual description of another novel bioinformatically detected viral gene of the present invention, referred to here as Viral Genomic Address Messenger 127 (VGAM127) viral gene, which modulates expression of respective host target genes thereof, the function and utility of which host target genes is known in the art.

[1732] VGAM127 is a novel bioinformatically detected regulatory, non protein coding, viral micro RNA (miRNA) gene. The method by which VGAM127 was detected is described hereinabove with reference to FIGS. 2-8.

[1733] VGAM127 gene, herein designated VGAM GENE, is a viral gene contained in the genome of Vaccinia virus. VGAM127 host target gene, herein designated VGAM HOST TARGET GENE, is a human gene contained in the human genome.

[1734] VGAM127 gene, herein designated VGAM GENE, encodes a VGAM127 precursor RNA, herein designated VGAM PRECURSOR RNA. Similar to other miRNA genes, and unlike most ordinary genes, VGAM127 precursor RNA, herein designated VGAM PRECURSOR RNA, does not encode a protein. A nucleotide sequence identical or highly similar to the nucleotide sequence of VGAM127 precursor RNA is designated SEQ ID:113, and is provided hereinbelow with reference to the sequence listing part. Nucleotide sequence SEQ ID:113 is located at position 56050 relative to the genome of Vaccinia virus.

[1735] VGAM127 precursor RNA, herein designated VGAM PRECURSOR RNA, folds onto itself, forming VGAM127 folded precursor RNA, herein designated VGAM FOLDED PRECURSOR RNA, which has a two-dimensional hairpin structure. As is well known in the art, this hairpin structure, is typical of RNA encoded by miRNA genes, and is due to the fact that the nucleotide sequence of the first half of the RNA encoded by a miRNA gene is an accurate or partial inversed-reversed sequence of the nucleotide sequence of the second half thereof.

[1736] An enzyme complex designated DICER COMPLEX, dices the VGAM127 folded precursor RNA, herein designated VGAM FOLDED PRECURSOR RNA, into VGAM127 RNA, herein designated VGAM RNA, a single stranded ˜22 nt long RNA segment. As is known in the art, dicing of a hairpin structured RNA precursor product into a short ˜22 nt RNA segment is catalyzed by an enzyme complex comprising an enzyme called Dicer together with other necessary proteins. A probable (over 75%) nucleotide sequence of VGAM127 RNA is designated SEQ ID:462, and is provided hereinbelow with reference to the sequence listing part.

[1737] VGAM127 host target gene, herein designated VGAM HOST TARGET GENE, encodes a corresponding messenger RNA, VGAM127 host target RNA, herein designated VGAM HOST TARGET RNA. VGAM127 host target RNA, herein designated VGAM HOST TARGET RNA, comprises three regions, as is typical of mRNA of a protein coding gene: a 5 untranslated region, a protein coding region and a 3 untranslated region, designated 5UTR, PROTEIN CODING and 3UTR respectively.

[1738] VGAM127 RNA, herein designated VGAM RNA, binds complementarily to one or more host target binding sites located in untranslated regions of VGAM127 host target RNA, herein designated VGAM HOST TARGET RNA. This complementary binding is due to the fact that the nucleotide sequence of VGAM127 RNA, herein designated VGAM RNA, is an accurate or a partial inversed-reversed sequence of the nucleotide sequence of each of the host target binding sites. As an illustration, FIG. 1 shows 3 such host target binding sites, designated BINDING SITE I, BINDING SITE II and BINDING SITE III respectively. It is appreciated that the number of host target binding sites shown in FIG. 1 is meant as an illustration only, and is not meant to be limiting VGAM127 RNA, herein designated VGAM RNA, may have a different number of host target binding sites in untranslated regions of a VGAM127 host target RNA, herein designated VGAM HOST TARGET RNA. It is further appreciated that while FIG. 1 depicts host target binding sites in the 3UTR region, this is meant as an example only these host target binding sites may be located in the 3UTR region, the 5UTR region, or in both 3UTR and 5UTR regions.

[1739] The complementary binding of VGAM127 RNA, herein designated VGAM RNA, to host target binding sites on VGAM127 host target RNA, herein designated VGAM HOST TARGET RNA, such as BINDING SITE I, BINDING SITE II and BINDING SITE III, inhibits translation of VGAM127 host target RNA, herein designated VGAM HOST TARGET RNA, into VGAM127 host target protein, herein designated VGAM HOST TARGET PROTEIN. VGAM host target protein is therefore outlined by a broken line.

[1740] It is appreciated that VGAM127 host target gene, herein designated VGAM HOST TARGET GENE, in fact represents a plurality of VGAM127 host target genes. The mRNA of each one of this plurality of VGAM127 host target genes comprises one or more host target binding sites, each having a nucleotide sequence which is at least partly complementary to VGAM127 RNA, herein designated VGAM RNA, and which when bound by VGAM127 RNA, herein designated VGAM RNA, causes inhibition of translation of respective one or more VGAM127 host target proteins.

[1741] It is further appreciated by one skilled in the art that the mode of translational inhibition illustrated by FIG. 1 with specific reference to translational inhibition exerted by VGAM127 gene, herein designated VGAM GENE, on one or more VGAM127 host target gene, herein designated VGAM HOST TARGET GENE, is in fact common to other known non-viral miRNA genes. As mentioned hereinabove with reference to the background section, although a specific complementary binding site has been demonstrated only for some of the known miRNA genes (primarily Lin-4 and Let-7), all other recently discovered miRNA genes are also believed by those skilled in the art to modulate expression of other genes by complementary binding, although specific complementary binding sites of these other miRNA genes have not yet been found (Ruvkun G., Perspective: Glimpses of a tiny RNA world, Science 294, 779 (2001)).

[1742] It is yet further appreciated that a function of VGAM127 is inhibition of expression of host target genes, as part of a novel viral mechanism of attacking a host. Accordingly, utilities of VGAM127 include diagnosis, prevention and treatment of viral infection by Vaccinia virus. Specific functions, and accordingly utilities, of VGAM127 correlate with, and may be deduced from, the identity of the host target genes which VGAM127 binds and inhibits, and the function of these host target genes, as elaborated hereinbelow.

[1743] Nucleotide sequences of the VGAM127 precursor RNA, herein designated VGAM PRECURSOR RNA, and of the diced VGAM127 RNA, herein designated VGAM RNA, and a schematic representation of the secondary folding of VGAM127 folded precursor RNA, herein designated VGAM FOLDED PRECURSOR RNA, of VGAM127 are further described hereinbelow with reference to Table 1.

[1744] Nucleotide sequences of host target binding sites, such as BINDING SITE-I, BINDING SITE-II and BINDING SITE-III of FIG. 1, found on, and schematic representation of the complementarity of each of these host target binding sites to VGAM127 RNA, herein designated VGAM RNA, are described hereinbelow with reference to Table 2.

[1745] FIG. 1 further provides a conceptual description of another novel bioinformatically detected viral gene of the present invention, referred to here as Viral Genomic Address Messenger 128 (VGAM128) viral gene, which modulates expression of respective host target genes thereof, the function and utility of which host target genes is known in the art.

[1746] VGAM128 is a novel bioinformatically detected regulatory, non protein coding, viral micro RNA (miRNA) gene. The method by which VGAM128 was detected is described hereinabove with reference to FIGS. 2-8.

[1747] VGAM128 gene, herein designated VGAM GENE, is a viral gene contained in the genome of Vaccinia virus. VGAM128 host target gene, herein designated VGAM HOST TARGET GENE, is a human gene contained in the human genome.

[1748] VGAM128 gene, herein designated VGAM GENE, encodes a VGAM128 precursor RNA, herein designated VGAM PRECURSOR RNA. Similar to other miRNA genes, and unlike most ordinary genes, VGAM128 precursor RNA, herein designated VGAM PRECURSOR RNA, does not encode a protein. A nucleotide sequence identical or highly similar to the nucleotide sequence of VGAM128 precursor RNA is designated SEQ ID:114, and is provided hereinbelow with reference to the sequence listing part. Nucleotide sequence SEQ ID:114 is located at position 55816 relative to the genome of Vaccinia virus.

[1749] VGAM128 precursor RNA, herein designated VGAM PRECURSOR RNA, folds onto itself, forming VGAM128 folded precursor RNA, herein designated VGAM FOLDED PRECURSOR RNA, which has a two-dimensional hairpin structure. As is well known in the art, this hairpin structure, is typical of RNA encoded by miRNA genes, and is due to the fact that the nucleotide sequence of the first half of the RNA encoded by a miRNA gene is an accurate or partial inversed-reversed sequence of the nucleotide sequence of the second half thereof.

[1750] An enzyme complex designated DICER COMPLEX, dices the VGAM128 folded precursor RNA, herein designated VGAM FOLDED PRECURSOR RNA, into VGAM128 RNA, herein designated VGAM RNA, a single stranded ˜22 nt long RNA segment. As is known in the art, dicing of a hairpin structured RNA precursor product into a short ˜22 nt RNA segment is catalyzed by an enzyme complex comprising an enzyme called Dicer together with other necessary proteins. A probable (over 93%) nucleotide sequence of VGAM128 RNA is designated SEQ ID:463, and is provided hereinbelow with reference to the sequence listing part.

[1751] VGAM128 host target gene, herein designated VGAM HOST TARGET GENE, encodes a corresponding messenger RNA, VGAM128 host target RNA, herein designated VGAM HOST TARGET RNA. VGAM128 host target RNA, herein designated VGAM HOST TARGET RNA, comprises three regions, as is typical of mRNA of a protein coding gene: a 5 untranslated region, a protein coding region and a 3 untranslated region, designated 5UTR, PROTEIN CODING and 3UTR respectively.

[1752] VGAM128 RNA, herein designated VGAM RNA, binds complementarily to one or more host target binding sites located in untranslated regions of VGAM128 host target RNA, herein designated VGAM HOST TARGET RNA. This complementary binding is due to the fact that the nucleotide sequence of VGAM128 RNA, herein designated VGAM RNA, is an accurate or a partial inversed-reversed sequence of the nucleotide sequence of each of the host target binding sites. As an illustration, FIG. 1 shows 3 such host target binding sites, designated BINDING SITE I, BINDING SITE II and BINDING SITE III respectively. It is appreciated that the number of host target binding sites shown in FIG. 1 is meant as an illustration only, and is not meant to be limiting VGAM128 RNA, herein designated VGAM RNA, may have a different number of host target binding sites in untranslated regions of a VGAM128 host target RNA, herein designated VGAM HOST TARGET RNA. It is further appreciated that while FIG. 1 depicts host target binding sites in the 3UTR region, this is meant as an example only these host target binding sites may be located in the 3UTR region, the 5UTR region, or in both 3UTR and 5UTR regions.

[1753] The complementary binding of VGAM128 RNA, herein designated VGAM RNA, to host target binding sites on VGAM128 host target RNA, herein designated VGAM HOST TARGET RNA, such as BINDING SITE I, BINDING SITE II and BINDING SITE III, inhibits translation of VGAM128 host target RNA, herein designated VGAM HOST TARGET RNA, into VGAM128 host target protein, herein designated VGAM HOST TARGET PROTEIN. VGAM host target protein is therefore outlined by a broken line.

[1754] It is appreciated that VGAM128 host target gene, herein designated VGAM HOST TARGET GENE, in fact represents a plurality of VGAM128 host target genes. The mRNA of each one of this plurality of VGAM128 host target genes comprises one or more host target binding sites, each having a nucleotide sequence which is at least partly complementary to VGAM128 RNA, herein designated VGAM RNA, and which when bound by VGAM128 RNA, herein designated VGAM RNA, causes inhibition of translation of respective one or more VGAM128 host target proteins.

[1755] It is further appreciated by one skilled in the art that the mode of translational inhibition illustrated by FIG. 1 with specific reference to translational inhibition exerted by VGAM128 gene, herein designated VGAM GENE, on one or more VGAM128 host target gene, herein designated VGAM HOST TARGET GENE, is in fact common to other known non-viral miRNA genes. As mentioned hereinabove with reference to the background section, although a specific complementary binding site has been demonstrated only for some of the known miRNA genes (primarily Lin-4 and Let-7), all other recently discovered miRNA genes are also believed by those skilled in the art to modulate expression of other genes by complementary binding, although specific complementary binding sites of these other miRNA genes have not yet been found (Ruvkun G., Perspective: Glimpses of a tiny RNA world, Science 294, 779 (2001)).

[1756] It is yet further appreciated that a function of VGAM128 is inhibition of expression of host target genes, as part of a novel viral mechanism of attacking a host. Accordingly, utilities of VGAM128 include diagnosis, prevention and treatment of viral infection by Vaccinia virus. Specific functions, and accordingly utilities, of VGAM128 correlate with, and may be deduced from, the identity of the host target genes which VGAM128 binds and inhibits, and the function of these host target genes, as elaborated hereinbelow.

[1757] Nucleotide sequences of the VGAM128 precursor RNA, herein designated VGAM PRECURSOR RNA, and of the diced VGAM128 RNA, herein designated VGAM RNA, and a schematic representation of the secondary folding of VGAM128 folded precursor RNA, herein designated VGAM FOLDED PRECURSOR RNA, of VGAM128 are further described hereinbelow with reference to Table 1.

[1758] Nucleotide sequences of host target binding sites, such as BINDING SITE-I, BINDING SITE-II and BINDING SITE-III of FIG. 1, found on, and schematic representation of the complementarity of each of these host target binding sites to VGAM128 RNA, herein designated VGAM RNA, are described hereinbelow with reference to Table 2.

[1759] FIG. 1 further provides a conceptual description of another novel bioinformatically detected viral gene of the present invention, referred to here as Viral Genomic Address Messenger 129 (VGAM129) viral gene, which modulates expression of respective host target genes thereof, the function and utility of which host target genes is known in the art.

[1760] VGAM129 is a novel bioinformatically detected regulatory, non protein coding, viral micro RNA (miRNA) gene. The method by which VGAM129 was detected is described hereinabove with reference to FIGS. 2-8.

[1761] VGAM129 gene, herein designated VGAM GENE, is a viral gene contained in the genome of Vaccinia virus. VGAM129 host target gene, herein designated VGAM HOST TARGET GENE, is a human gene contained in the human genome.

[1762] VGAM129 gene, herein designated VGAM GENE, encodes a VGAM129 precursor RNA, herein designated VGAM PRECURSOR RNA. Similar to other miRNA genes, and unlike most ordinary genes, VGAM129 precursor RNA, herein designated VGAM PRECURSOR RNA, does not encode a protein. A nucleotide sequence identical or highly similar to the nucleotide sequence of VGAM129 precursor RNA is designated SEQ ID:115, and is provided hereinbelow with reference to the sequence listing part. Nucleotide sequence SEQ ID:115 is located at position 57776 relative to the genome of Vaccinia virus.

[1763] VGAM129 precursor RNA, herein designated VGAM PRECURSOR RNA, folds onto itself, forming VGAM129 folded precursor RNA, herein designated VGAM FOLDED PRECURSOR RNA, which has a two-dimensional hairpin structure. As is well known in the art, this hairpin structure, is typical of RNA encoded by miRNA genes, and is due to the fact that the nucleotide sequence of the first half of the RNA encoded by a miRNA gene is an accurate or partial inversed-reversed sequence of the nucleotide sequence of the second half thereof.

[1764] An enzyme complex designated DICER COMPLEX, dices the VGAM129 folded precursor RNA, herein designated VGAM FOLDED PRECURSOR RNA, into VGAM129 RNA, herein designated VGAM RNA, a single stranded ˜22 nt long RNA segment. As is known in the art, dicing of a hairpin structured RNA precursor product into a short ˜22 nt RNA segment is catalyzed by an enzyme complex comprising an enzyme called Dicer together with other necessary proteins. A probable (over 76%) nucleotide sequence of VGAM129 RNA is designated SEQ ID:464, and is provided hereinbelow with reference to the sequence listing part.

[1765] VGAM129 host target gene, herein designated VGAM HOST TARGET GENE, encodes a corresponding messenger RNA, VGAM129 host target RNA, herein designated VGAM HOST TARGET RNA. VGAM129 host target RNA, herein designated VGAM HOST TARGET RNA, comprises three regions, as is typical of mRNA of a protein coding gene: a 5 untranslated region, a protein coding region and a 3 untranslated region, designated 5UTR, PROTEIN CODING and 3UTR respectively.

[1766] VGAM129 RNA, herein designated VGAM RNA, binds complementarily to one or more host target binding sites located in untranslated regions of VGAM129 host target RNA, herein designated VGAM HOST TARGET RNA. This complementary binding is due to the fact that the nucleotide sequence of VGAM129 RNA, herein designated VGAM RNA, is an accurate or a partial inversed-reversed sequence of the nucleotide sequence of each of the host target binding sites. As an illustration, FIG. 1 shows 3 such host target binding sites, designated BINDING SITE I, BINDING SITE II and BINDING SITE III respectively. It is appreciated that the number of host target binding sites shown in FIG. 1 is meant as an illustration only, and is not meant to be limiting VGAM129 RNA, herein designated VGAM RNA, may have a different number of host target binding sites in untranslated regions of a VGAM129 host target RNA, herein designated VGAM HOST TARGET RNA. It is further appreciated that while FIG. 1 depicts host target binding sites in the 3UTR region, this is meant as an example only these host target binding sites may be located in the 3UTR region, the 5UTR region, or in both 3UTR and 5UTR regions.

[1767] The complementary binding of VGAM129 RNA, herein designated VGAM RNA, to host target binding sites on VGAM129 host target RNA, herein designated VGAM HOST TARGET RNA, such as BINDING SITE I, BINDING SITE II and BINDING SITE III, inhibits translation of VGAM129 host target RNA, herein designated VGAM HOST TARGET RNA, into VGAM129 host target protein, herein designated VGAM HOST TARGET PROTEIN. VGAM host target protein is therefore outlined by a broken line.

[1768] It is appreciated that VGAM129 host target gene, herein designated VGAM HOST TARGET GENE, in fact represents a plurality of VGAM129 host target genes. The mRNA of each one of this plurality of VGAM129 host target genes comprises one or more host target binding sites, each having a nucleotide sequence which is at least partly complementary to VGAM129 RNA, herein designated VGAM RNA, and which when bound by VGAM129 RNA, herein designated VGAM RNA, causes inhibition of translation of respective one or more VGAM129 host target proteins.

[1769] It is further appreciated by one skilled in the art that the mode of translational inhibition illustrated by FIG. 1 with specific reference to translational inhibition exerted by VGAM129 gene, herein designated VGAM GENE, on one or more VGAM129 host target gene, herein designated VGAM HOST TARGET GENE, is in fact common to other known non-viral miRNA genes. As mentioned hereinabove with reference to the background section, although a specific complementary binding site has been demonstrated only for some of the known miRNA genes (primarily Lin-4 and Let-7), all other recently discovered miRNA genes are also believed by those skilled in the art to modulate expression of other genes by complementary binding, although specific complementary binding sites of these other miRNA genes have not yet been found (Ruvkun G., Perspective: Glimpses of a tiny RNA world, Science 294, 779 (2001)).

[1770] It is yet further appreciated that a function of VGAM129 is inhibition of expression of host target genes, as part of a novel viral mechanism of attacking a host. Accordingly, utilities of VGAM129 include diagnosis, prevention and treatment of viral infection by Vaccinia virus. Specific functions, and accordingly utilities, of VGAM129 correlate with, and may be deduced from, the identity of the host target genes which VGAM129 binds and inhibits, and the function of these host target genes, as elaborated hereinbelow.

[1771] Nucleotide sequences of the VGAM129 precursor RNA, herein designated VGAM PRECURSOR RNA, and of the diced VGAM129 RNA, herein designated VGAM RNA, and a schematic representation of the secondary folding of VGAM129 folded precursor RNA, herein designated VGAM FOLDED PRECURSOR RNA, of VGAM129 are further described hereinbelow with reference to Table 1.

[1772] Nucleotide sequences of host target binding sites, such as BINDING SITE-I, BINDING SITE-II and BINDING SITE-III of FIG. 1, found on, and schematic representation of the complementarity of each of these host target binding sites to VGAM129 RNA, herein designated VGAM RNA, are described hereinbelow with reference to Table 2.

[1773] FIG. 1 further provides a conceptual description of another novel bioinformatically detected viral gene of the present invention, referred to here as Viral Genomic Address Messenger 130 (VGAM130) viral gene, which modulates expression of respective host target genes thereof, the function and utility of which host target genes is known in the art.

[1774] VGAM130 is a novel bioinformatically detected regulatory, non protein coding, viral micro RNA (miRNA) gene. The method by which VGAM130 was detected is described hereinabove with reference to FIGS. 2-8.

[1775] VGAM130 gene, herein designated VGAM GENE, is a viral gene contained in the genome of Vaccinia virus. VGAM130 host target gene, herein designated VGAM HOST TARGET GENE, is a human gene contained in the human genome.

[1776] VGAM130 gene, herein designated VGAM GENE, encodes a VGAM130 precursor RNA, herein designated VGAM PRECURSOR RNA. Similar to other miRNA genes, and unlike most ordinary genes, VGAM130 precursor RNA, herein designated VGAM PRECURSOR RNA, does not encode a protein. A nucleotide sequence identical or highly similar to the nucleotide sequence of VGAM130 precursor RNA is designated SEQ ID:116, and is provided hereinbelow with reference to the sequence listing part. Nucleotide sequence SEQ ID:116 is located at position 60133 relative to the genome of Vaccinia virus.

[1777] VGAM130 precursor RNA, herein designated VGAM PRECURSOR RNA, folds onto itself, forming VGAM130 folded precursor RNA, herein designated VGAM FOLDED PRECURSOR RNA, which has a two-dimensional hairpin structure. As is well known in the art, this hairpin structure, is typical of RNA encoded by miRNA genes, and is due to the fact that the nucleotide sequence of the first half of the RNA encoded by a miRNA gene is an accurate or partial inversed-reversed sequence of the nucleotide sequence of the second half thereof.

[1778] An enzyme complex designated DICER COMPLEX, dices the VGAM130 folded precursor RNA, herein designated VGAM FOLDED PRECURSOR RNA, into VGAM130 RNA, herein designated VGAM RNA, a single stranded ˜22 nt long RNA segment. As is known in the art, dicing of a hairpin structured RNA precursor product into a short ˜22 nt RNA segment is catalyzed by an enzyme complex comprising an enzyme called Dicer together with other necessary proteins. A probable (over 80%) nucleotide sequence of VGAM130 RNA is designated SEQ ID:465, and is provided hereinbelow with reference to the sequence listing part.

[1779] VGAM130 host target gene, herein designated VGAM HOST TARGET GENE, encodes a corresponding messenger RNA, VGAM130 host target RNA, herein designated VGAM HOST TARGET RNA. VGAM130 host target RNA, herein designated VGAM HOST TARGET RNA, comprises three regions, as is typical of mRNA of a protein coding gene: a 5 untranslated region, a protein coding region and a 3 untranslated region, designated 5UTR, PROTEIN CODING and 3UTR respectively.

[1780] VGAM130 RNA, herein designated VGAM RNA, binds complementarily to one or more host target binding sites located in untranslated regions of VGAM130 host target RNA, herein designated VGAM HOST TARGET RNA. This complementary binding is due to the fact that the nucleotide sequence of VGAM130 RNA, herein designated VGAM RNA, is an accurate or a partial inversed-reversed sequence of the nucleotide sequence of each of the host target binding sites. As an illustration, FIG. 1 shows 3 such host target binding sites, designated BINDING SITE I, BINDING SITE II and BINDING SITE III respectively. It is appreciated that the number of host target binding sites shown in FIG. 1 is meant as an illustration only, and is not meant to be limiting VGAM130 RNA, herein designated VGAM RNA, may have a different number of host target binding sites in untranslated regions of a VGAM130 host target RNA, herein designated VGAM HOST TARGET RNA. It is further appreciated that while FIG. 1 depicts host target binding sites in the 3UTR region, this is meant as an example only these host target binding sites may be located in the 3UTR region, the 5UTR region, or in both 3UTR and 5UTR regions.

[1781] The complementary binding of VGAM130 RNA, herein designated VGAM RNA, to host target binding sites on VGAM130 host target RNA, herein designated VGAM HOST TARGET RNA, such as BINDING SITE I, BINDING SITE II and BINDING SITE III, inhibits translation of VGAM130 host target RNA, herein designated VGAM HOST TARGET RNA, into VGAM130 host target protein, herein designated VGAM HOST TARGET PROTEIN. VGAM host target protein is therefore outlined by a broken line.

[1782] It is appreciated that VGAM130 host target gene, herein designated VGAM HOST TARGET GENE, in fact represents a plurality of VGAM130 host target genes. The mRNA of each one of this plurality of VGAM130 host target genes comprises one or more host target binding sites, each having a nucleotide sequence which is at least partly complementary to VGAM130 RNA, herein designated VGAM RNA, and which when bound by VGAM130 RNA, herein designated VGAM RNA, causes inhibition of translation of respective one or more VGAM130 host target proteins.

[1783] It is further appreciated by one skilled in the art that the mode of translational inhibition illustrated by FIG. 1 with specific reference to translational inhibition exerted by VGAM130 gene, herein designated VGAM GENE, on one or more VGAM130 host target gene, herein designated VGAM HOST TARGET GENE, is in fact common to other known non-viral miRNA genes. As mentioned hereinabove with reference to the background section, although a specific complementary binding site has been demonstrated only for some of the known miRNA genes (primarily Lin-4 and Let-7), all other recently discovered miRNA genes are also believed by those skilled in the art to modulate expression of other genes by complementary binding, although specific complementary binding sites of these other miRNA genes have not yet been found (Ruvkun G., Perspective: Glimpses of a tiny RNA world, Science 294, 779 (2001)).

[1784] It is yet further appreciated that a function of VGAM130 is inhibition of expression of host target genes, as part of a novel viral mechanism of attacking a host. Accordingly, utilities of VGAM130 include diagnosis, prevention and treatment of viral infection by Vaccinia virus. Specific functions, and accordingly utilities, of VGAM130 correlate with, and may be deduced from, the identity of the host target genes which VGAM130 binds and inhibits, and the function of these host target genes, as elaborated hereinbelow.

[1785] Nucleotide sequences of the VGAM130 precursor RNA, herein designated VGAM PRECURSOR RNA, and of the diced VGAM130 RNA, herein designated VGAM RNA, and a schematic representation of the secondary folding of VGAM130 folded precursor RNA, herein designated VGAM FOLDED PRECURSOR RNA, of VGAM130 are further described hereinbelow with reference to Table 1.

[1786] Nucleotide sequences of host target binding sites, such as BINDING SITE-I, BINDING SITE-II and BINDING SITE-III of FIG. 1, found on, and schematic representation of the complementarity of each of these host target binding sites to VGAM130 RNA, herein designated VGAM RNA, are described hereinbelow with reference to Table 2.

[1787] FIG. 1 further provides a conceptual description of another novel bioinformatically detected viral gene of the present invention, referred to here as Viral Genomic Address Messenger 131 (VGAM131) viral gene, which modulates expression of respective host target genes thereof, the function and utility of which host target genes is known in the art.

[1788] VGAM131 is a novel bioinformatically detected regulatory, non protein coding, viral micro RNA (miRNA) gene. The method by which VGAM131 was detected is described hereinabove with reference to FIGS. 2-8.

[1789] VGAM131 gene, herein designated VGAM GENE, is a viral gene contained in the genome of Vaccinia virus. VGAM131 host target gene, herein designated VGAM HOST TARGET GENE, is a human gene contained in the human genome.

[1790] VGAM131 gene, herein designated VGAM GENE, encodes a VGAM131 precursor RNA, herein designated VGAM PRECURSOR RNA. Similar to other miRNA genes, and unlike most ordinary genes, VGAM131 precursor RNA, herein designated VGAM PRECURSOR RNA, does not encode a protein. A nucleotide sequence identical or highly similar to the nucleotide sequence of VGAM131 precursor RNA is designated SEQ ID:117, and is provided hereinbelow with reference to the sequence listing part. Nucleotide sequence SEQ ID:117 is located at position 60496 relative to the genome of Vaccinia virus.

[1791] VGAM131 precursor RNA, herein designated VGAM PRECURSOR RNA, folds onto itself, forming VGAM131 folded precursor RNA, herein designated VGAM FOLDED PRECURSOR RNA, which has a two-dimensional hairpin structure. As is well known in the art, this hairpin structure, is typical of RNA encoded by miRNA genes, and is due to the fact that the nucleotide sequence of the first half of the RNA encoded by a miRNA gene is an accurate or partial inversed-reversed sequence of the nucleotide sequence of the second half thereof.

[1792] An enzyme complex designated DICER COMPLEX, dices the VGAM131 folded precursor RNA, herein designated VGAM FOLDED PRECURSOR RNA, into VGAM131 RNA, herein designated VGAM RNA, a single stranded ˜22 nt long RNA segment. As is known in the art, dicing of a hairpin structured RNA precursor product into a short ˜22 nt RNA segment is catalyzed by an enzyme complex comprising an enzyme called Dicer together with other necessary proteins. A probable (over 89%) nucleotide sequence of VGAM131 RNA is designated SEQ ID:466, and is provided hereinbelow with reference to the sequence listing part.

[1793] VGAM131 host target gene, herein designated VGAM HOST TARGET GENE, encodes a corresponding messenger RNA, VGAM131 host target RNA, herein designated VGAM HOST TARGET RNA. VGAM131 host target RNA, herein designated VGAM HOST TARGET RNA, comprises three regions, as is typical of mRNA of a protein coding gene: a 5 untranslated region, a protein coding region and a 3 untranslated region, designated 5UTR, PROTEIN CODING and 3UTR respectively.

[1794] VGAM131 RNA, herein designated VGAM RNA, binds complementarily to one or more host target binding sites located in untranslated regions of VGAM131 host target RNA, herein designated VGAM HOST TARGET RNA. This complementary binding is due to the fact that the nucleotide sequence of VGAM131 RNA, herein designated VGAM RNA, is an accurate or a partial inversed-reversed sequence of the nucleotide sequence of each of the host target binding sites. As an illustration, FIG. 1 shows 3 such host target binding sites, designated BINDING SITE I, BINDING SITE II and BINDING SITE III respectively. It is appreciated that the number of host target binding sites shown in FIG. 1 is meant as an illustration only, and is not meant to be limiting VGAM131 RNA, herein designated VGAM RNA, may have a different number of host target binding sites in untranslated regions of a VGAM131 host target RNA, herein designated VGAM HOST TARGET RNA. It is further appreciated that while FIG. 1 depicts host target binding sites in the 3UTR region, this is meant as an example only these host target binding sites may be located in the 3UTR region, the 5UTR region, or in both 3UTR and 5UTR regions.

[1795] The complementary binding of VGAM131 RNA, herein designated VGAM RNA, to host target binding sites on VGAM131 host target RNA, herein designated VGAM HOST TARGET RNA, such as BINDING SITE I, BINDING SITE II and BINDING SITE III, inhibits translation of VGAM131 host target RNA, herein designated VGAM HOST TARGET RNA, into VGAM131 host target protein, herein designated VGAM HOST TARGET PROTEIN. VGAM host target protein is therefore outlined by a broken line.

[1796] It is appreciated that VGAM131 host target gene, herein designated VGAM HOST TARGET GENE, in fact represents a plurality of VGAM131 host target genes. The mRNA of each one of this plurality of VGAM131 host target genes comprises one or more host target binding sites, each having a nucleotide sequence which is at least partly complementary to VGAM131 RNA, herein designated VGAM RNA, and which when bound by VGAM131 RNA, herein designated VGAM RNA, causes inhibition of translation of respective one or more VGAM131 host target proteins.

[1797] It is further appreciated by one skilled in the art that the mode of translational inhibition illustrated by FIG. 1 with specific reference to translational inhibition exerted by VGAM131 gene, herein designated VGAM GENE, on one or more VGAM131 host target gene, herein designated VGAM HOST TARGET GENE, is in fact common to other known non-viral miRNA genes. As mentioned hereinabove with reference to the background section, although a specific complementary binding site has been demonstrated only for some of the known miRNA genes (primarily Lin-4 and Let-7), all other recently discovered miRNA genes are also believed by those skilled in the art to modulate expression of other genes by complementary binding, although specific complementary binding sites of these other miRNA genes have not yet been found (Ruvkun G., Perspective: Glimpses of a tiny RNA world, Science 294, 779 (2001)).

[1798] It is yet further appreciated that a function of VGAM131 is inhibition of expression of host target genes, as part of a novel viral mechanism of attacking a host. Accordingly, utilities of VGAM131 include diagnosis, prevention and treatment of viral infection by Vaccinia virus. Specific functions, and accordingly utilities, of VGAM131 correlate with, and may be deduced from, the identity of the host target genes which VGAM131 binds and inhibits, and the function of these host target genes, as elaborated hereinbelow.

[1799] Nucleotide sequences of the VGAM131 precursor RNA, herein designated VGAM PRECURSOR RNA, and of the diced VGAM131 RNA, herein designated VGAM RNA, and a schematic representation of the secondary folding of VGAM131 folded precursor RNA, herein designated VGAM FOLDED PRECURSOR RNA, of VGAM131 are further described hereinbelow with reference to Table 1.

[1800] Nucleotide sequences of host target binding sites, such as BINDING SITE-I, BINDING SITE-II and BINDING SITE-III of FIG. 1, found on, and schematic representation of the complementarity of each of these host target binding sites to VGAM131 RNA, herein designated VGAM RNA, are described hereinbelow with reference to Table 2.

[1801] FIG. 1 further provides a conceptual description of another novel bioinformatically detected viral gene of the present invention, referred to here as Viral Genomic Address Messenger 132 (VGAM132) viral gene, which modulates expression of respective host target genes thereof, the function and utility of which host target genes is known in the art.

[1802] VGAM132 is a novel bioinformatically detected regulatory, non protein coding, viral micro RNA (miRNA) gene. The method by which VGAM132 was detected is described hereinabove with reference to FIGS. 2-8.

[1803] VGAM132 gene, herein designated VGAM GENE, is a viral gene contained in the genome of Vaccinia virus. VGAM132 host target gene, herein designated VGAM HOST TARGET GENE, is a human gene contained in the human genome.

[1804] VGAM132 gene, herein designated VGAM GENE, encodes a VGAM132 precursor RNA, herein designated VGAM PRECURSOR RNA. Similar to other miRNA genes, and unlike most ordinary genes, VGAM132 precursor RNA, herein designated VGAM PRECURSOR RNA, does not encode a protein. A nucleotide sequence identical or highly similar to the nucleotide sequence of VGAM132 precursor RNA is designated SEQ ID:118, and is provided hereinbelow with reference to the sequence listing part. Nucleotide sequence SEQ ID:118 is located at position 60420 relative to the genome of Vaccinia virus.

[1805] VGAM132 precursor RNA, herein designated VGAM PRECURSOR RNA, folds onto itself, forming VGAM132 folded precursor RNA, herein designated VGAM FOLDED PRECURSOR RNA, which has a two-dimensional hairpin structure. As is well known in the art, this hairpin structure, is typical of RNA encoded by miRNA genes, and is due to the fact that the nucleotide sequence of the first half of the RNA encoded by a miRNA gene is an accurate or partial inversed-reversed sequence of the nucleotide sequence of the second half thereof.

[1806] An enzyme complex designated DICER COMPLEX, dices the VGAM132 folded precursor RNA, herein designated VGAM FOLDED PRECURSOR RNA, into VGAM132 RNA, herein designated VGAM RNA, a single stranded ˜22 nt long RNA segment. As is known in the art, dicing of a hairpin structured RNA precursor product into a short ˜22 nt RNA segment is catalyzed by an enzyme complex comprising an enzyme called Dicer together with other necessary proteins. A probable (over 71%) nucleotide sequence of VGAM132 RNA is designated SEQ ID:467, and is provided hereinbelow with reference to the sequence listing part.

[1807] VGAM132 host target gene, herein designated VGAM HOST TARGET GENE, encodes a corresponding messenger RNA, VGAM132 host target RNA, herein designated VGAM HOST TARGET RNA. VGAM132 host target RNA, herein designated VGAM HOST TARGET RNA, comprises three regions, as is typical of mRNA of a protein coding gene: a 5 untranslated region, a protein coding region and a 3 untranslated region, designated 5UTR, PROTEIN CODING and 3UTR respectively.

[1808] VGAM132 RNA, herein designated VGAM RNA, binds complementarily to one or more host target binding sites located in untranslated regions of VGAM132 host target RNA, herein designated VGAM HOST TARGET RNA. This complementary binding is due to the fact that the nucleotide sequence of VGAM132 RNA, herein designated VGAM RNA, is an accurate or a partial inversed-reversed sequence of the nucleotide sequence of each of the host target binding sites. As an illustration, FIG. 1 shows 3 such host target binding sites, designated BINDING SITE I, BINDING SITE II and BINDING SITE III respectively. It is appreciated that the number of host target binding sites shown in FIG. 1 is meant as an illustration only, and is not meant to be limiting VGAM132 RNA, herein designated VGAM RNA, may have a different number of host target binding sites in untranslated regions of a VGAM132 host target RNA, herein designated VGAM HOST TARGET RNA. It is further appreciated that while FIG. 1 depicts host target binding sites in the 3UTR region, this is meant as an example only these host target binding sites may be located in the 3UTR region, the 5UTR region, or in both 3UTR and 5UTR regions.

[1809] The complementary binding of VGAM132 RNA, herein designated VGAM RNA, to host target binding sites on VGAM132 host target RNA, herein designated VGAM HOST TARGET RNA, such as BINDING SITE I, BINDING SITE II and BINDING SITE III, inhibits translation of VGAM132 host target RNA, herein designated VGAM HOST TARGET RNA, into VGAM132 host target protein, herein designated VGAM HOST TARGET PROTEIN. VGAM host target protein is therefore outlined by a broken line.

[1810] It is appreciated that VGAM132 host target gene, herein designated VGAM HOST TARGET GENE, in fact represents a plurality of VGAM132 host target genes. The mRNA of each one of this plurality of VGAM132 host target genes comprises one or more host target binding sites, each having a nucleotide sequence which is at least partly complementary to VGAM132 RNA, herein designated VGAM RNA, and which when bound by VGAM132 RNA, herein designated VGAM RNA, causes inhibition of translation of respective one or more VGAM132 host target proteins.

[1811] It is further appreciated by one skilled in the art that the mode of translational inhibition illustrated by FIG. 1 with specific reference to translational inhibition exerted by VGAM132 gene, herein designated VGAM GENE, on one or more VGAM132 host target gene, herein designated VGAM HOST TARGET GENE, is in fact common to other known non-viral miRNA genes. As mentioned hereinabove with reference to the background section, although a specific complementary binding site has been demonstrated only for some of the known miRNA genes (primarily Lin-4 and Let-7), all other recently discovered miRNA genes are also believed by those skilled in the art to modulate expression of other genes by complementary binding, although specific complementary binding sites of these other miRNA genes have not yet been found (Ruvkun G., Perspective: Glimpses of a tiny RNA world, Science 294, 779 (2001)).

[1812] It is yet further appreciated that a function of VGAM132 is inhibition of expression of host target genes, as part of a novel viral mechanism of attacking a host. Accordingly, utilities of VGAM132 include diagnosis, prevention and treatment of viral infection by Vaccinia virus. Specific functions, and accordingly utilities, of VGAM132 correlate with, and may be deduced from, the identity of the host target genes which VGAM132 binds and inhibits, and the function of these host target genes, as elaborated hereinbelow.

[1813] Nucleotide sequences of the VGAM132 precursor RNA, herein designated VGAM PRECURSOR RNA, and of the diced VGAM132 RNA, herein designated VGAM RNA, and a schematic representation of the secondary folding of VGAM132 folded precursor RNA, herein designated VGAM FOLDED PRECURSOR RNA, of VGAM132 are further described hereinbelow with reference to Table 1.

[1814] Nucleotide sequences of host target binding sites, such as BINDING SITE-I, BINDING SITE-II and BINDING SITE-III of FIG. 1, found on, and schematic representation of the complementarity of each of these host target binding sites to VGAM132 RNA, herein designated VGAM RNA, are described hereinbelow with reference to Table 2.

[1815] FIG. 1 further provides a conceptual description of another novel bioinformatically detected viral gene of the present invention, referred to here as Viral Genomic Address Messenger 133 (VGAM133) viral gene, which modulates expression of respective host target genes thereof, the function and utility of which host target genes is known in the art.

[1816] VGAM133 is a novel bioinformatically detected regulatory, non protein coding, viral micro RNA (miRNA) gene. The method by which VGAM133 was detected is described hereinabove with reference to FIGS. 2-8.

[1817] VGAM133 gene, herein designated VGAM GENE, is a viral gene contained in the genome of Vaccinia virus. VGAM133 host target gene, herein designated VGAM HOST TARGET GENE, is a human gene contained in the human genome.

[1818] VGAM133 gene, herein designated VGAM GENE, encodes a VGAM133 precursor RNA, herein designated VGAM PRECURSOR RNA. Similar to other miRNA genes, and unlike most ordinary genes, VGAM133 precursor RNA, herein designated VGAM PRECURSOR RNA, does not encode a protein. A nucleotide sequence identical or highly similar to the nucleotide sequence of VGAM133 precursor RNA is designated SEQ ID:119, and is provided hereinbelow with reference to the sequence listing part. Nucleotide sequence SEQ ID:119 is located at position 62117 relative to the genome of Vaccinia virus.

[1819] VGAM133 precursor RNA, herein designated VGAM PRECURSOR RNA, folds onto itself, forming VGAM133 folded precursor RNA, herein designated VGAM FOLDED PRECURSOR RNA, which has a two-dimensional hairpin structure. As is well known in the art, this hairpin structure, is typical of RNA encoded by miRNA genes, and is due to the fact that the nucleotide sequence of the first half of the RNA encoded by a miRNA gene is an accurate or partial inversed-reversed sequence of the nucleotide sequence of the second half thereof.

[1820] An enzyme complex designated DICER COMPLEX, dices the VGAM133 folded precursor RNA, herein designated VGAM FOLDED PRECURSOR RNA, into VGAM133 RNA, herein designated VGAM RNA, a single stranded ˜22 nt long RNA segment. As is known in the art, dicing of a hairpin structured RNA precursor product into a short ˜22 nt RNA segment is catalyzed by an enzyme complex comprising an enzyme called Dicer together with other necessary proteins. A probable (over 72%) nucleotide sequence of VGAM133 RNA is designated SEQ ID:468, and is provided hereinbelow with reference to the sequence listing part.

[1821] VGAM133 host target gene, herein designated VGAM HOST TARGET GENE, encodes a corresponding messenger RNA, VGAM133 host target RNA, herein designated VGAM HOST TARGET RNA. VGAM133 host target RNA, herein designated VGAM HOST TARGET RNA, comprises three regions, as is typical of mRNA of a protein coding gene: a 5 untranslated region, a protein coding region and a 3 untranslated region, designated 5UTR, PROTEIN CODING and 3UTR respectively.

[1822] VGAM133 RNA, herein designated VGAM RNA, binds complementarily to one or more host target binding sites located in untranslated regions of VGAM133 host target RNA, herein designated VGAM HOST TARGET RNA. This complementary binding is due to the fact that the nucleotide sequence of VGAM133 RNA, herein designated VGAM RNA, is an accurate or a partial inversed-reversed sequence of the nucleotide sequence of each of the host target binding sites. As an illustration, FIG. 1 shows 3 such host target binding sites, designated BINDING SITE I, BINDING SITE II and BINDING SITE III respectively. It is appreciated that the number of host target binding sites shown in FIG. 1 is meant as an illustration only, and is not meant to be limiting VGAM133 RNA, herein designated VGAM RNA, may have a different number of host target binding sites in untranslated regions of a VGAM133 host target RNA, herein designated VGAM HOST TARGET RNA. It is further appreciated that while FIG. 1 depicts host target binding sites in the 3UTR region, this is meant as an example only these host target binding sites may be located in the 3UTR region, the 5UTR region, or in both 3UTR and 5UTR regions.

[1823] The complementary binding of VGAM133 RNA, herein designated VGAM RNA, to host target binding sites on VGAM133 host target RNA, herein designated VGAM HOST TARGET RNA, such as BINDING SITE I, BINDING SITE II and BINDING SITE III, inhibits translation of VGAM133 host target RNA, herein designated VGAM HOST TARGET RNA, into VGAM133 host target protein, herein designated VGAM HOST TARGET PROTEIN. VGAM host target protein is therefore outlined by a broken line.

[1824] It is appreciated that VGAM133 host target gene, herein designated VGAM HOST TARGET GENE, in fact represents a plurality of VGAM133 host target genes. The mRNA of each one of this plurality of VGAM133 host target genes comprises one or more host target binding sites, each having a nucleotide sequence which is at least partly complementary to VGAM133 RNA, herein designated VGAM RNA, and which when bound by VGAM133 RNA, herein designated VGAM RNA, causes inhibition of translation of respective one or more VGAM133 host target proteins.

[1825] It is further appreciated by one skilled in the art that the mode of translational inhibition illustrated by FIG. 1 with specific reference to translational inhibition exerted by VGAM133 gene, herein designated VGAM GENE, on one or more VGAM133 host target gene, herein designated VGAM HOST TARGET GENE, is in fact common to other known non-viral miRNA genes. As mentioned hereinabove with reference to the background section, although a specific complementary binding site has been demonstrated only for some of the known miRNA genes (primarily Lin-4 and Let-7), all other recently discovered miRNA genes are also believed by those skilled in the art to modulate expression of other genes by complementary binding, although specific complementary binding sites of these other miRNA genes have not yet been found (Ruvkun G., Perspective: Glimpses of a tiny RNA world, Science 294, 779 (2001)).

[1826] It is yet further appreciated that a function of VGAM133 is inhibition of expression of host target genes, as part of a novel viral mechanism of attacking a host. Accordingly, utilities of VGAM133 include diagnosis, prevention and treatment of viral infection by Vaccinia virus. Specific functions, and accordingly utilities, of VGAM133 correlate with, and may be deduced from, the identity of the host target genes which VGAM133 binds and inhibits, and the function of these host target genes, as elaborated hereinbelow.

[1827] Nucleotide sequences of the VGAM133 precursor RNA, herein designated VGAM PRECURSOR RNA, and of the diced VGAM133 RNA, herein designated VGAM RNA, and a schematic representation of the secondary folding of VGAM133 folded precursor RNA, herein designated VGAM FOLDED PRECURSOR RNA, of VGAM133 are further described hereinbelow with reference to Table 1.

[1828] Nucleotide sequences of host target binding sites, such as BINDING SITE-I, BINDING SITE-II and BINDING SITE-III of FIG. 1, found on, and schematic representation of the complementarity of each of these host target binding sites to VGAM133 RNA, herein designated VGAM RNA, are described hereinbelow with reference to Table 2.

[1829] FIG. 1 further provides a conceptual description of another novel bioinformatically detected viral gene of the present invention, referred to here as Viral Genomic Address Messenger 134 (VGAM134) viral gene, which modulates expression of respective host target genes thereof, the function and utility of which host target genes is known in the art.

[1830] VGAM134 is a novel bioinformatically detected regulatory, non protein coding, viral micro RNA (miRNA) gene. The method by which VGAM134 was detected is described hereinabove with reference to FIGS. 2-8.

[1831] VGAM134 gene, herein designated VGAM GENE, is a viral gene contained in the genome of Vaccinia virus. VGAM134 host target gene, herein designated VGAM HOST TARGET GENE, is a human gene contained in the human genome.

[1832] VGAM134 gene, herein designated VGAM GENE, encodes a VGAM134 precursor RNA, herein designated VGAM PRECURSOR RNA. Similar to other miRNA genes, and unlike most ordinary genes, VGAM134 precursor RNA, herein designated VGAM PRECURSOR RNA, does not encode a protein. A nucleotide sequence identical or highly similar to the nucleotide sequence of VGAM134 precursor RNA is designated SEQ ID:120, and is provided hereinbelow with reference to the sequence listing part. Nucleotide sequence SEQ ID:120 is located at position 62005 relative to the genome of Vaccinia virus.

[1833] VGAM134 precursor RNA, herein designated VGAM PRECURSOR RNA, folds onto itself, forming VGAM134 folded precursor RNA, herein designated VGAM FOLDED PRECURSOR RNA, which has a two-dimensional hairpin structure. As is well known in the art, this hairpin structure, is typical of RNA encoded by miRNA genes, and is due to the fact that the nucleotide sequence of the first half of the RNA encoded by a miRNA gene is an accurate or partial inversed-reversed sequence of the nucleotide sequence of the second half thereof.

[1834] An enzyme complex designated DICER COMPLEX, dices the VGAM134 folded precursor RNA, herein designated VGAM FOLDED PRECURSOR RNA, into VGAM134 RNA, herein designated VGAM RNA, a single stranded ˜22 nt long RNA segment. As is known in the art, dicing of a hairpin structured RNA precursor product into a short ˜22 nt RNA segment is catalyzed by an enzyme complex comprising an enzyme called Dicer together with other necessary proteins. A probable (over 88%) nucleotide sequence of VGAM134 RNA is designated SEQ ID:469, and is provided hereinbelow with reference to the sequence listing part.

[1835] VGAM134 host target gene, herein designated VGAM HOST TARGET GENE, encodes a corresponding messenger RNA, VGAM134 host target RNA, herein designated VGAM HOST TARGET RNA. VGAM134 host target RNA, herein designated VGAM HOST TARGET RNA, comprises three regions, as is typical of mRNA of a protein coding gene: a 5 untranslated region, a protein coding region and a 3 untranslated region, designated 5UTR, PROTEIN CODING and 3UTR respectively.

[1836] VGAM134 RNA, herein designated VGAM RNA, binds complementarily to one or more host target binding sites located in untranslated regions of VGAM134 host target RNA, herein designated VGAM HOST TARGET RNA. This complementary binding is due to the fact that the nucleotide sequence of VGAM134 RNA, herein designated VGAM RNA, is an accurate or a partial inversed-reversed sequence of the nucleotide sequence of each of the host target binding sites. As an illustration, FIG. 1 shows 3 such host target binding sites, designated BINDING SITE I, BINDING SITE II and BINDING SITE III respectively. It is appreciated that the number of host target binding sites shown in FIG. 1 is meant as an illustration only, and is not meant to be limiting VGAM134 RNA, herein designated VGAM RNA, may have a different number of host target binding sites in untranslated regions of a VGAM134 host target RNA, herein designated VGAM HOST TARGET RNA. It is further appreciated that while FIG. 1 depicts host target binding sites in the 3UTR region, this is meant as an example only these host target binding sites may be located in the 3UTR region, the 5UTR region, or in both 3UTR and 5UTR regions.

[1837] The complementary binding of VGAM134 RNA, herein designated VGAM RNA, to host target binding sites on VGAM134 host target RNA, herein designated VGAM HOST TARGET RNA, such as BINDING SITE I, BINDING SITE II and BINDING SITE III, inhibits translation of VGAM134 host target RNA, herein designated VGAM HOST TARGET RNA, into VGAM134 host target protein, herein designated VGAM HOST TARGET PROTEIN. VGAM host target protein is therefore outlined by a broken line.

[1838] It is appreciated that VGAM134 host target gene, herein designated VGAM HOST TARGET GENE, in fact represents a plurality of VGAM134 host target genes. The mRNA of each one of this plurality of VGAM134 host target genes comprises one or more host target binding sites, each having a nucleotide sequence which is at least partly complementary to VGAM134 RNA, herein designated VGAM RNA, and which when bound by VGAM134 RNA, herein designated VGAM RNA, causes inhibition of translation of respective one or more VGAM134 host target proteins.

[1839] It is further appreciated by one skilled in the art that the mode of translational inhibition illustrated by FIG. 1 with specific reference to translational inhibition exerted by VGAM134 gene, herein designated VGAM GENE, on one or more VGAM134 host target gene, herein designated VGAM HOST TARGET GENE, is in fact common to other known non-viral miRNA genes. As mentioned hereinabove with reference to the background section, although a specific complementary binding site has been demonstrated only for some of the known miRNA genes (primarily Lin-4 and Let-7), all other recently discovered miRNA genes are also believed by those skilled in the art to modulate expression of other genes by complementary binding, although specific complementary binding sites of these other miRNA genes have not yet been found (Ruvkun G., Perspective: Glimpses of a tiny RNA world, Science 294, 779 (2001)).

[1840] It is yet further appreciated that a function of VGAM134 is inhibition of expression of host target genes, as part of a novel viral mechanism of attacking a host. Accordingly, utilities of VGAM134 include diagnosis, prevention and treatment of viral infection by Vaccinia virus. Specific functions, and accordingly utilities, of VGAM134 correlate with, and may be deduced from, the identity of the host target genes which VGAM134 binds and inhibits, and the function of these host target genes, as elaborated hereinbelow.

[1841] Nucleotide sequences of the VGAM134 precursor RNA, herein designated VGAM PRECURSOR RNA, and of the diced VGAM134 RNA, herein designated VGAM RNA, and a schematic representation of the secondary folding of VGAM134 folded precursor RNA, herein designated VGAM FOLDED PRECURSOR RNA, of VGAM134 are further described hereinbelow with reference to Table 1.

[1842] Nucleotide sequences of host target binding sites, such as BINDING SITE-I, BINDING SITE-II and BINDING SITE-III of FIG. 1, found on, and schematic representation of the complementarity of each of these host target binding sites to VGAM134 RNA, herein designated VGAM RNA, are described hereinbelow with reference to Table 2.

[1843] FIG. 1 further provides a conceptual description of another novel bioinformatically detected viral gene of the present invention, referred to here as Viral Genomic Address Messenger 135 (VGAM135) viral gene, which modulates expression of respective host target genes thereof, the function and utility of which host target genes is known in the art.

[1844] VGAM135 is a novel bioinformatically detected regulatory, non protein coding, viral micro RNA (miRNA) gene. The method by which VGAM135 was detected is described hereinabove with reference to FIGS. 2-8.

[1845] VGAM135 gene, herein designated VGAM GENE, is a viral gene contained in the genome of Vaccinia virus. VGAM135 host target gene, herein designated VGAM HOST TARGET GENE, is a human gene contained in the human genome.

[1846] VGAM135 gene, herein designated VGAM GENE, encodes a VGAM135 precursor RNA, herein designated VGAM PRECURSOR RNA. Similar to other miRNA genes, and unlike most ordinary genes, VGAM135 precursor RNA, herein designated VGAM PRECURSOR RNA, does not encode a protein. A nucleotide sequence identical or highly similar to the nucleotide sequence of VGAM135 precursor RNA is designated SEQ ID:121, and is provided hereinbelow with reference to the sequence listing part. Nucleotide sequence SEQ ID:121 is located at position 64481 relative to the genome of Vaccinia virus.

[1847] VGAM135 precursor RNA, herein designated VGAM PRECURSOR RNA, folds onto itself, forming VGAM135 folded precursor RNA, herein designated VGAM FOLDED PRECURSOR RNA, which has a two-dimensional hairpin structure. As is well known in the art, this hairpin structure, is typical of RNA encoded by miRNA genes, and is due to the fact that the nucleotide sequence of the first half of the RNA encoded by a miRNA gene is an accurate or partial inversed-reversed sequence of the nucleotide sequence of the second half thereof.

[1848] An enzyme complex designated DICER COMPLEX, dices the VGAM135 folded precursor RNA, herein designated VGAM FOLDED PRECURSOR RNA, into VGAM135 RNA, herein designated VGAM RNA, a single stranded ˜22 nt long RNA segment. As is known in the art, dicing of a hairpin structured RNA precursor product into a short ˜22 nt RNA segment is catalyzed by an enzyme complex comprising an enzyme called Dicer together with other necessary proteins. A probable (over 77%) nucleotide sequence of VGAM135 RNA is designated SEQ ID:470, and is provided hereinbelow with reference to the sequence listing part.

[1849] VGAM135 host target gene, herein designated VGAM HOST TARGET GENE, encodes a corresponding messenger RNA, VGAM135 host target RNA, herein designated VGAM HOST TARGET RNA. VGAM135 host target RNA, herein designated VGAM HOST TARGET RNA, comprises three regions, as is typical of mRNA of a protein coding gene: a 5 untranslated region, a protein coding region and a 3 untranslated region, designated 5UTR, PROTEIN CODING and 3UTR respectively.

[1850] VGAM135 RNA, herein designated VGAM RNA, binds complementarily to one or more host target binding sites located in untranslated regions of VGAM135 host target RNA, herein designated VGAM HOST TARGET RNA. This complementary binding is due to the fact that the nucleotide sequence of VGAM135 RNA, herein designated VGAM RNA, is an accurate or a partial inversed-reversed sequence of the nucleotide sequence of each of the host target binding sites. As an illustration, FIG. 1 shows 3 such host target binding sites, designated BINDING SITE I, BINDING SITE II and BINDING SITE III respectively. It is appreciated that the number of host target binding sites shown in FIG. 1 is meant as an illustration only, and is not meant to be limiting VGAM135 RNA, herein designated VGAM RNA, may have a different number of host target binding sites in untranslated regions of a VGAM135 host target RNA, herein designated VGAM HOST TARGET RNA. It is further appreciated that while FIG. 1 depicts host target binding sites in the 3UTR region, this is meant as an example only these host target binding sites may be located in the 3UTR region, the 5UTR region, or in both 3UTR and 5UTR regions.

[1851] The complementary binding of VGAM135 RNA, herein designated VGAM RNA, to host target binding sites on VGAM135 host target RNA, herein designated VGAM HOST TARGET RNA, such as BINDING SITE I, BINDING SITE II and BINDING SITE III, inhibits translation of VGAM135 host target RNA, herein designated VGAM HOST TARGET RNA, into VGAM135 host target protein, herein designated VGAM HOST TARGET PROTEIN. VGAM host target protein is therefore outlined by a broken line.

[1852] It is appreciated that VGAM135 host target gene, herein designated VGAM HOST TARGET GENE, in fact represents a plurality of VGAM135 host target genes. The mRNA of each one of this plurality of VGAM135 host target genes comprises one or more host target binding sites, each having a nucleotide sequence which is at least partly complementary to VGAM135 RNA, herein designated VGAM RNA, and which when bound by VGAM135 RNA, herein designated VGAM RNA, causes inhibition of translation of respective one or more VGAM135 host target proteins.

[1853] It is further appreciated by one skilled in the art that the mode of translational inhibition illustrated by FIG. 1 with specific reference to translational inhibition exerted by VGAM135 gene, herein designated VGAM GENE, on one or more VGAM135 host target gene, herein designated VGAM HOST TARGET GENE, is in fact common to other known non-viral miRNA genes. As mentioned hereinabove with reference to the background section, although a specific complementary binding site has been demonstrated only for some of the known miRNA genes (primarily Lin-4 and Let-7), all other recently discovered miRNA genes are also believed by those skilled in the art to modulate expression of other genes by complementary binding, although specific complementary binding sites of these other miRNA genes have not yet been found (Ruvkun G., Perspective: Glimpses of a tiny RNA world, Science 294, 779 (2001)).

[1854] It is yet further appreciated that a function of VGAM135 is inhibition of expression of host target genes, as part of a novel viral mechanism of attacking a host. Accordingly, utilities of VGAM135 include diagnosis, prevention and treatment of viral infection by Vaccinia virus. Specific functions, and accordingly utilities, of VGAM135 correlate with, and may be deduced from, the identity of the host target genes which VGAM135 binds and inhibits, and the function of these host target genes, as elaborated hereinbelow.

[1855] Nucleotide sequences of the VGAM135 precursor RNA, herein designated VGAM PRECURSOR RNA, and of the diced VGAM135 RNA, herein designated VGAM RNA, and a schematic representation of the secondary folding of VGAM135 folded precursor RNA, herein designated VGAM FOLDED PRECURSOR RNA, of VGAM135 are further described hereinbelow with reference to Table 1.

[1856] Nucleotide sequences of host target binding sites, such as BINDING SITE-I, BINDING SITE-II and BINDING SITE-III of FIG. 1, found on, and schematic representation of the complementarity of each of these host target binding sites to VGAM135 RNA, herein designated VGAM RNA, are described hereinbelow with reference to Table 2.

[1857] FIG. 1 further provides a conceptual description of another novel bioinformatically detected viral gene of the present invention, referred to here as Viral Genomic Address Messenger 136 (VGAM136) viral gene, which modulates expression of respective host target genes thereof, the function and utility of which host target genes is known in the art.

[1858] VGAM136 is a novel bioinformatically detected regulatory, non protein coding, viral micro RNA (miRNA) gene. The method by which VGAM136 was detected is described hereinabove with reference to FIGS. 2-8.

[1859] VGAM136 gene, herein designated VGAM GENE, is a viral gene contained in the genome of Vaccinia virus. VGAM136 host target gene, herein designated VGAM HOST TARGET GENE, is a human gene contained in the human genome.

[1860] VGAM136 gene, herein designated VGAM GENE, encodes a VGAM136 precursor RNA, herein designated VGAM PRECURSOR RNA. Similar to other miRNA genes, and unlike most ordinary genes, VGAM136 precursor RNA, herein designated VGAM PRECURSOR RNA, does not encode a protein. A nucleotide sequence identical or highly similar to the nucleotide sequence of VGAM136 precursor RNA is designated SEQ ID:122, and is provided hereinbelow with reference to the sequence listing part. Nucleotide sequence SEQ ID:122 is located at position 65175 relative to the genome of Vaccinia virus.

[1861] VGAM136 precursor RNA, herein designated VGAM PRECURSOR RNA, folds onto itself, forming VGAM136 folded precursor RNA, herein designated VGAM FOLDED PRECURSOR RNA, which has a two-dimensional hairpin structure. As is well known in the art, this hairpin structure, is typical of RNA encoded by miRNA genes, and is due to the fact that the nucleotide sequence of the first half of the RNA encoded by a miRNA gene is an accurate or partial inversed-reversed sequence of the nucleotide sequence of the second half thereof.

[1862] An enzyme complex designated DICER COMPLEX, dices the VGAM136 folded precursor RNA, herein designated VGAM FOLDED PRECURSOR RNA, into VGAM136 RNA, herein designated VGAM RNA, a single stranded ˜22 nt long RNA segment. As is known in the art, dicing of a hairpin structured RNA precursor product into a short ˜22 nt RNA segment is catalyzed by an enzyme complex comprising an enzyme called Dicer together with other necessary proteins. A probable (over 82%) nucleotide sequence of VGAM136 RNA is designated SEQ ID:471, and is provided hereinbelow with reference to the sequence listing part.

[1863] VGAM136 host target gene, herein designated VGAM HOST TARGET GENE, encodes a corresponding messenger RNA, VGAM136 host target RNA, herein designated VGAM HOST TARGET RNA. VGAM136 host target RNA, herein designated VGAM HOST TARGET RNA, comprises three regions, as is typical of mRNA of a protein coding gene: a 5 untranslated region, a protein coding region and a 3 untranslated region, designated 5UTR, PROTEIN CODING and 3UTR respectively.

[1864] VGAM136 RNA, herein designated VGAM RNA, binds complementarily to one or more host target binding sites located in untranslated regions of VGAM136 host target RNA, herein designated VGAM HOST TARGET RNA. This complementary binding is due to the fact that the nucleotide sequence of VGAM136 RNA, herein designated VGAM RNA, is an accurate or a partial inversed-reversed sequence of the nucleotide sequence of each of the host target binding sites. As an illustration, FIG. 1 shows 3 such host target binding sites, designated BINDING SITE I, BINDING SITE II and BINDING SITE III respectively. It is appreciated that the number of host target binding sites shown in FIG. 1 is meant as an illustration only, and is not meant to be limiting VGAM136 RNA, herein designated VGAM RNA, may have a different number of host target binding sites in untranslated regions of a VGAM136 host target RNA, herein designated VGAM HOST TARGET RNA. It is further appreciated that while FIG. 1 depicts host target binding sites in the 3UTR region, this is meant as an example only these host target binding sites may be located in the 3UTR region, the 5UTR region, or in both 3UTR and 5UTR regions.

[1865] The complementary binding of VGAM136 RNA, herein designated VGAM RNA, to host target binding sites on VGAM136 host target RNA, herein designated VGAM HOST TARGET RNA, such as BINDING SITE I, BINDING SITE II and BINDING SITE III, inhibits translation of VGAM136 host target RNA, herein designated VGAM HOST TARGET RNA, into VGAM136 host target protein, herein designated VGAM HOST TARGET PROTEIN. VGAM host target protein is therefore outlined by a broken line.

[1866] It is appreciated that VGAM136 host target gene, herein designated VGAM HOST TARGET GENE, in fact represents a plurality of VGAM136 host target genes. The mRNA of each one of this plurality of VGAM136 host target genes comprises one or more host target binding sites, each having a nucleotide sequence which is at least partly complementary to VGAM136 RNA, herein designated VGAM RNA, and which when bound by VGAM136 RNA, herein designated VGAM RNA, causes inhibition of translation of respective one or more VGAM136 host target proteins.

[1867] It is further appreciated by one skilled in the art that the mode of translational inhibition illustrated by FIG. 1 with specific reference to translational inhibition exerted by VGAM136 gene, herein designated VGAM GENE, on one or more VGAM136 host target gene, herein designated VGAM HOST TARGET GENE, is in fact common to other known non-viral miRNA genes. As mentioned hereinabove with reference to the background section, although a specific complementary binding site has been demonstrated only for some of the known miRNA genes (primarily Lin-4 and Let-7), all other recently discovered miRNA genes are also believed by those skilled in the art to modulate expression of other genes by complementary binding, although specific complementary binding sites of these other miRNA genes have not yet been found (Ruvkun G., Perspective: Glimpses of a tiny RNA world, Science 294, 779 (2001)).

[1868] It is yet further appreciated that a function of VGAM136 is inhibition of expression of host target genes, as part of a novel viral mechanism of attacking a host. Accordingly, utilities of VGAM136 include diagnosis, prevention and treatment of viral infection by Vaccinia virus. Specific functions, and accordingly utilities, of VGAM136 correlate with, and may be deduced from, the identity of the host target genes which VGAM136 binds and inhibits, and the function of these host target genes, as elaborated hereinbelow.

[1869] Nucleotide sequences of the VGAM136 precursor RNA, herein designated VGAM PRECURSOR RNA, and of the diced VGAM136 RNA, herein designated VGAM RNA, and a schematic representation of the secondary folding of VGAM136 folded precursor RNA, herein designated VGAM FOLDED PRECURSOR RNA, of VGAM136 are further described hereinbelow with reference to Table 1.

[1870] Nucleotide sequences of host target binding sites, such as BINDING SITE-I, BINDING SITE-II and BINDING SITE-III of FIG. 1, found on, and schematic representation of the complementarity of each of these host target binding sites to VGAM136 RNA, herein designated VGAM RNA, are described hereinbelow with reference to Table 2.

[1871] FIG. 1 further provides a conceptual description of another novel bioinformatically detected viral gene of the present invention, referred to here as Viral Genomic Address Messenger 137 (VGAM137) viral gene, which modulates expression of respective host target genes thereof, the function and utility of which host target genes is known in the art.

[1872] VGAM137 is a novel bioinformatically detected regulatory, non protein coding, viral micro RNA (miRNA) gene. The method by which VGAM137 was detected is described hereinabove with reference to FIGS. 2-8.

[1873] VGAM137 gene, herein designated VGAM GENE, is a viral gene contained in the genome of Vaccinia virus. VGAM137 host target gene, herein designated VGAM HOST TARGET GENE, is a human gene contained in the human genome.

[1874] VGAM137 gene, herein designated VGAM GENE, encodes a VGAM137 precursor RNA, herein designated VGAM PRECURSOR RNA. Similar to other miRNA genes, and unlike most ordinary genes, VGAM137 precursor RNA, herein designated VGAM PRECURSOR RNA, does not encode a protein. A nucleotide sequence identical or highly similar to the nucleotide sequence of VGAM137 precursor RNA is designated SEQ ID:123, and is provided hereinbelow with reference to the sequence listing part. Nucleotide sequence SEQ ID:123 is located at position 64691 relative to the genome of Vaccinia virus.

[1875] VGAM137 precursor RNA, herein designated VGAM PRECURSOR RNA, folds onto itself, forming VGAM137 folded precursor RNA, herein designated VGAM FOLDED PRECURSOR RNA, which has a two-dimensional hairpin structure. As is well known in the art, this hairpin structure, is typical of RNA encoded by miRNA genes, and is due to the fact that the nucleotide sequence of the first half of the RNA encoded by a miRNA gene is an accurate or partial inversed-reversed sequence of the nucleotide sequence of the second half thereof.

[1876] An enzyme complex designated DICER COMPLEX, dices the VGAM137 folded precursor RNA, herein designated VGAM FOLDED PRECURSOR RNA, into VGAM137 RNA, herein designated VGAM RNA, a single stranded ˜22 nt long RNA segment. As is known in the art, dicing of a hairpin structured RNA precursor product into a short ˜22 nt RNA segment is catalyzed by an enzyme complex comprising an enzyme called Dicer together with other necessary proteins. A probable (over 90%) nucleotide sequence of VGAM137 RNA is designated SEQ ID:472, and is provided hereinbelow with reference to the sequence listing part.

[1877] VGAM137 host target gene, herein designated VGAM HOST TARGET GENE, encodes a corresponding messenger RNA, VGAM137 host target RNA, herein designated VGAM HOST TARGET RNA. VGAM137 host target RNA, herein designated VGAM HOST TARGET RNA, comprises three regions, as is typical of mRNA of a protein coding gene: a 5 untranslated region, a protein coding region and a 3 untranslated region, designated 5UTR, PROTEIN CODING and 3UTR respectively.

[1878] VGAM137 RNA, herein designated VGAM RNA, binds complementarily to one or more host target binding sites located in untranslated regions of VGAM137 host target RNA, herein designated VGAM HOST TARGET RNA. This complementary binding is due to the fact that the nucleotide sequence of VGAM137 RNA, herein designated VGAM RNA, is an accurate or a partial inversed-reversed sequence of the nucleotide sequence of each of the host target binding sites. As an illustration, FIG. 1 shows 3 such host target binding sites, designated BINDING SITE I, BINDING SITE II and BINDING SITE III respectively. It is appreciated that the number of host target binding sites shown in FIG. 1 is meant as an illustration only, and is not meant to be limiting VGAM137 RNA, herein designated VGAM RNA, may have a different number of host target binding sites in untranslated regions of a VGAM137 host target RNA, herein designated VGAM HOST TARGET RNA. It is further appreciated that while FIG. 1 depicts host target binding sites in the 3UTR region, this is meant as an example only these host target binding sites may be located in the 3UTR region, the 5UTR region, or in both 3UTR and 5UTR regions.

[1879] The complementary binding of VGAM137 RNA, herein designated VGAM RNA, to host target binding sites on VGAM137 host target RNA, herein designated VGAM HOST TARGET RNA, such as BINDING SITE I, BINDING SITE II and BINDING SITE III, inhibits translation of VGAM137 host target RNA, herein designated VGAM HOST TARGET RNA, into VGAM137 host target protein, herein designated VGAM HOST TARGET PROTEIN. VGAM host target protein is therefore outlined by a broken line.

[1880] It is appreciated that VGAM137 host target gene, herein designated VGAM HOST TARGET GENE, in fact represents a plurality of VGAM137 host target genes. The mRNA of each one of this plurality of VGAM137 host target genes comprises one or more host target binding sites, each having a nucleotide sequence which is at least partly complementary to VGAM137 RNA, herein designated VGAM RNA, and which when bound by VGAM137 RNA, herein designated VGAM RNA, causes inhibition of translation of respective one or more VGAM137 host target proteins.

[1881] It is further appreciated by one skilled in the art that the mode of translational inhibition illustrated by FIG. 1 with specific reference to translational inhibition exerted by VGAM137 gene, herein designated VGAM GENE, on one or more VGAM137 host target gene, herein designated VGAM HOST TARGET GENE, is in fact common to other known non-viral miRNA genes. As mentioned hereinabove with reference to the background section, although a specific complementary binding site has been demonstrated only for some of the known miRNA genes (primarily Lin-4 and Let-7), all other recently discovered miRNA genes are also believed by those skilled in the art to modulate expression of other genes by complementary binding, although specific complementary binding sites of these other miRNA genes have not yet been found (Ruvkun G., Perspective: Glimpses of a tiny RNA world, Science 294, 779 (2001)).

[1882] It is yet further appreciated that a function of VGAM137 is inhibition of expression of host target genes, as part of a novel viral mechanism of attacking a host. Accordingly, utilities of VGAM137 include diagnosis, prevention and treatment of viral infection by Vaccinia virus. Specific functions, and accordingly utilities, of VGAM137 correlate with, and may be deduced from, the identity of the host target genes which VGAM137 binds and inhibits, and the function of these host target genes, as elaborated hereinbelow.

[1883] Nucleotide sequences of the VGAM137 precursor RNA, herein designated VGAM PRECURSOR RNA, and of the diced VGAM137 RNA, herein designated VGAM RNA, and a schematic representation of the secondary folding of VGAM137 folded precursor RNA, herein designated VGAM FOLDED PRECURSOR RNA, of VGAM137 are further described hereinbelow with reference to Table 1.

[1884] Nucleotide sequences of host target binding sites, such as BINDING SITE-I, BINDING SITE-II and BINDING SITE-III of FIG. 1, found on, and schematic representation of the complementarity of each of these host target binding sites to VGAM137 RNA, herein designated VGAM RNA, are described hereinbelow with reference to Table 2.

[1885] FIG. 1 further provides a conceptual description of another novel bioinformatically detected viral gene of the present invention, referred to here as Viral Genomic Address Messenger 138 (VGAM138) viral gene, which modulates expression of respective host target genes thereof, the function and utility of which host target genes is known in the art.

[1886] VGAM138 is a novel bioinformatically detected regulatory, non protein coding, viral micro RNA (miRNA) gene. The method by which VGAM138 was detected is described hereinabove with reference to FIGS. 2-8.

[1887] VGAM138 gene, herein designated VGAM GENE, is a viral gene contained in the genome of Vaccinia virus. VGAM138 host target gene, herein designated VGAM HOST TARGET GENE, is a human gene contained in the human genome.

[1888] VGAM138 gene, herein designated VGAM GENE, encodes a VGAM138 precursor RNA, herein designated VGAM PRECURSOR RNA. Similar to other miRNA genes, and unlike most ordinary genes, VGAM138 precursor RNA, herein designated VGAM PRECURSOR RNA, does not encode a protein. A nucleotide sequence identical or highly similar to the nucleotide sequence of VGAM138 precursor RNA is designated SEQ ID:124, and is provided hereinbelow with reference to the sequence listing part. Nucleotide sequence SEQ ID:124 is located at position 63387 relative to the genome of Vaccinia virus.

[1889] VGAM138 precursor RNA, herein designated VGAM PRECURSOR RNA, folds onto itself, forming VGAM138 folded precursor RNA, herein designated VGAM FOLDED PRECURSOR RNA, which has a two-dimensional hairpin structure. As is well known in the art, this hairpin structure, is typical of RNA encoded by miRNA genes, and is due to the fact that the nucleotide sequence of the first half of the RNA encoded by a miRNA gene is an accurate or partial inversed-reversed sequence of the nucleotide sequence of the second half thereof.

[1890] An enzyme complex designated DICER COMPLEX, dices the VGAM138 folded precursor RNA, herein designated VGAM FOLDED PRECURSOR RNA, into VGAM138 RNA, herein designated VGAM RNA, a single stranded ˜22 nt long RNA segment. As is known in the art, dicing of a hairpin structured RNA precursor product into a short ˜22 nt RNA segment is catalyzed by an enzyme complex comprising an enzyme called Dicer together with other necessary proteins. A probable (over 85%) nucleotide sequence of VGAM138 RNA is designated SEQ ID:473, and is provided hereinbelow with reference to the sequence listing part.

[1891] VGAM138 host target gene, herein designated VGAM HOST TARGET GENE, encodes a corresponding messenger RNA, VGAM138 host target RNA, herein designated VGAM HOST TARGET RNA. VGAM138 host target RNA, herein designated VGAM HOST TARGET RNA, comprises three regions, as is typical of mRNA of a protein coding gene: a 5 untranslated region, a protein coding region and a 3 untranslated region, designated 5UTR, PROTEIN CODING and 3UTR respectively.

[1892] VGAM138 RNA, herein designated VGAM RNA, binds complementarily to one or more host target binding sites located in untranslated regions of VGAM138 host target RNA, herein designated VGAM HOST TARGET RNA. This complementary binding is due to the fact that the nucleotide sequence of VGAM138 RNA, herein designated VGAM RNA, is an accurate or a partial inversed-reversed sequence of the nucleotide sequence of each of the host target binding sites. As an illustration, FIG. 1 shows 3 such host target binding sites, designated BINDING SITE I, BINDING SITE II and BINDING SITE III respectively. It is appreciated that the number of host target binding sites shown in FIG. 1 is meant as an illustration only, and is not meant to be limiting VGAM138 RNA, herein designated VGAM RNA, may have a different number of host target binding sites in untranslated regions of a VGAM138 host target RNA, herein designated VGAM HOST TARGET RNA. It is further appreciated that while FIG. 1 depicts host target binding sites in the 3UTR region, this is meant as an example only these host target binding sites may be located in the 3UTR region, the 5UTR region, or in both 3UTR and 5UTR regions.

[1893] The complementary binding of VGAM138 RNA, herein designated VGAM RNA, to host target binding sites on VGAM138 host target RNA, herein designated VGAM HOST TARGET RNA, such as BINDING SITE I, BINDING SITE II and BINDING SITE III, inhibits translation of VGAM138 host target RNA, herein designated VGAM HOST TARGET RNA, into VGAM138 host target protein, herein designated VGAM HOST TARGET PROTEIN. VGAM host target protein is therefore outlined by a broken line.

[1894] It is appreciated that VGAM138 host target gene, herein designated VGAM HOST TARGET GENE, in fact represents a plurality of VGAM138 host target genes. The mRNA of each one of this plurality of VGAM138 host target genes comprises one or more host target binding sites, each having a nucleotide sequence which is at least partly complementary to VGAM138 RNA, herein designated VGAM RNA, and which when bound by VGAM138 RNA, herein designated VGAM RNA, causes inhibition of translation of respective one or more VGAM138 host target proteins.

[1895] It is further appreciated by one skilled in the art that the mode of translational inhibition illustrated by FIG. 1 with specific reference to translational inhibition exerted by VGAM138 gene, herein designated VGAM GENE, on one or more VGAM138 host target gene, herein designated VGAM HOST TARGET GENE, is in fact common to other known non-viral miRNA genes. As mentioned hereinabove with reference to the background section, although a specific complementary binding site has been demonstrated only for some of the known miRNA genes (primarily Lin-4 and Let-7), all other recently discovered miRNA genes are also believed by those skilled in the art to modulate expression of other genes by complementary binding, although specific complementary binding sites of these other miRNA genes have not yet been found (Ruvkun G., Perspective: Glimpses of a tiny RNA world, Science 294, 779 (2001)).

[1896] It is yet further appreciated that a function of VGAM138 is inhibition of expression of host target genes, as part of a novel viral mechanism of attacking a host. Accordingly, utilities of VGAM138 include diagnosis, prevention and treatment of viral infection by Vaccinia virus. Specific functions, and accordingly utilities, of VGAM138 correlate with, and may be deduced from, the identity of the host target genes which VGAM138 binds and inhibits, and the function of these host target genes, as elaborated hereinbelow.

[1897] Nucleotide sequences of the VGAM138 precursor RNA, herein designated VGAM PRECURSOR RNA, and of the diced VGAM138 RNA, herein designated VGAM RNA, and a schematic representation of the secondary folding of VGAM138 folded precursor RNA, herein designated VGAM FOLDED PRECURSOR RNA, of VGAM138 are further described hereinbelow with reference to Table 1.

[1898] Nucleotide sequences of host target binding sites, such as BINDING SITE-I, BINDING SITE-II and BINDING SITE-III of FIG. 1, found on, and schematic representation of the complementarity of each of these host target binding sites to VGAM138 RNA, herein designated VGAM RNA, are described hereinbelow with reference to Table 2.

[1899] FIG. 1 further provides a conceptual description of another novel bioinformatically detected viral gene of the present invention, referred to here as Viral Genomic Address Messenger 139 (VGAM139) viral gene, which modulates expression of respective host target genes thereof, the function and utility of which host target genes is known in the art.

[1900] VGAM139 is a novel bioinformatically detected regulatory, non protein coding, viral micro RNA (miRNA) gene. The method by which VGAM139 was detected is described hereinabove with reference to FIGS. 2-8.

[1901] VGAM139 gene, herein designated VGAM GENE, is a viral gene contained in the genome of Vaccinia virus. VGAM139 host target gene, herein designated VGAM HOST TARGET GENE, is a human gene contained in the human genome.

[1902] VGAM139 gene, herein designated VGAM GENE, encodes a VGAM139 precursor RNA, herein designated VGAM PRECURSOR RNA. Similar to other miRNA genes, and unlike most ordinary genes, VGAM139 precursor RNA, herein designated VGAM PRECURSOR RNA, does not encode a protein. A nucleotide sequence identical or highly similar to the nucleotide sequence of VGAM139 precursor RNA is designated SEQ ID:125, and is provided hereinbelow with reference to the sequence listing part. Nucleotide sequence SEQ ID:125 is located at position 63571 relative to the genome of Vaccinia virus.

[1903] VGAM139 precursor RNA, herein designated VGAM PRECURSOR RNA, folds onto itself, forming VGAM139 folded precursor RNA, herein designated VGAM FOLDED PRECURSOR RNA, which has a two-dimensional hairpin structure. As is well known in the art, this hairpin structure, is typical of RNA encoded by miRNA genes, and is due to the fact that the nucleotide sequence of the first half of the RNA encoded by a miRNA gene is an accurate or partial inversed-reversed sequence of the nucleotide sequence of the second half thereof.

[1904] An enzyme complex designated DICER COMPLEX, dices the VGAM139 folded precursor RNA, herein designated VGAM FOLDED PRECURSOR RNA, into VGAM139 RNA, herein designated VGAM RNA, a single stranded ˜22 nt long RNA segment. As is known in the art, dicing of a hairpin structured RNA precursor product into a short ˜22 nt RNA segment is catalyzed by an enzyme complex comprising an enzyme called Dicer together with other necessary proteins. A probable (over 89%) nucleotide sequence of VGAM139 RNA is designated SEQ ID:474, and is provided hereinbelow with reference to the sequence listing part.

[1905] VGAM139 host target gene, herein designated VGAM HOST TARGET GENE, encodes a corresponding messenger RNA, VGAM139 host target RNA, herein designated VGAM HOST TARGET RNA. VGAM139 host target RNA, herein designated VGAM HOST TARGET RNA, comprises three regions, as is typical of mRNA of a protein coding gene: a 5 untranslated region, a protein coding region and a 3 untranslated region, designated 5UTR, PROTEIN CODING and 3UTR respectively.

[1906] VGAM139 RNA, herein designated VGAM RNA, binds complementarily to one or more host target binding sites located in untranslated regions of VGAM139 host target RNA, herein designated VGAM HOST TARGET RNA. This complementary binding is due to the fact that the nucleotide sequence of VGAM139 RNA, herein designated VGAM RNA, is an accurate or a partial inversed-reversed sequence of the nucleotide sequence of each of the host target binding sites. As an illustration, FIG. 1 shows 3 such host target binding sites, designated BINDING SITE I, BINDING SITE II and BINDING SITE III respectively. It is appreciated that the number of host target binding sites shown in FIG. 1 is meant as an illustration only, and is not meant to be limiting VGAM139 RNA, herein designated VGAM RNA, may have a different number of host target binding sites in untranslated regions of a VGAM139 host target RNA, herein designated VGAM HOST TARGET RNA. It is further appreciated that while FIG. 1 depicts host target binding sites in the 3UTR region, this is meant as an example only these host target binding sites may be located in the 3UTR region, the 5UTR region, or in both 3UTR and 5UTR regions.

[1907] The complementary binding of VGAM139 RNA, herein designated VGAM RNA, to host target binding sites on VGAM139 host target RNA, herein designated VGAM HOST TARGET RNA, such as BINDING SITE I, BINDING SITE II and BINDING SITE III, inhibits translation of VGAM139 host target RNA, herein designated VGAM HOST TARGET RNA, into VGAM139 host target protein, herein designated VGAM HOST TARGET PROTEIN. VGAM host target protein is therefore outlined by a broken line.

[1908] It is appreciated that VGAM139 host target gene, herein designated VGAM HOST TARGET GENE, in fact represents a plurality of VGAM139 host target genes. The mRNA of each one of this plurality of VGAM139 host target genes comprises one or more host target binding sites, each having a nucleotide sequence which is at least partly complementary to VGAM139 RNA, herein designated VGAM RNA, and which when bound by VGAM139 RNA, herein designated VGAM RNA, causes inhibition of translation of respective one or more VGAM139 host target proteins.

[1909] It is further appreciated by one skilled in the art that the mode of translational inhibition illustrated by FIG. 1 with specific reference to translational inhibition exerted by VGAM139 gene, herein designated VGAM GENE, on one or more VGAM139 host target gene, herein designated VGAM HOST TARGET GENE, is in fact common to other known non-viral miRNA genes. As mentioned hereinabove with reference to the background section, although a specific complementary binding site has been demonstrated only for some of the known miRNA genes (primarily Lin-4 and Let-7), all other recently discovered miRNA genes are also believed by those skilled in the art to modulate expression of other genes by complementary binding, although specific complementary binding sites of these other miRNA genes have not yet been found (Ruvkun G., Perspective: Glimpses of a tiny RNA world, Science 294, 779 (2001)).

[1910] It is yet further appreciated that a function of VGAM139 is inhibition of expression of host target genes, as part of a novel viral mechanism of attacking a host. Accordingly, utilities of VGAM139 include diagnosis, prevention and treatment of viral infection by Vaccinia virus. Specific functions, and accordingly utilities, of VGAM139 correlate with, and may be deduced from, the identity of the host target genes which VGAM139 binds and inhibits, and the function of these host target genes, as elaborated hereinbelow.

[1911] Nucleotide sequences of the VGAM139 precursor RNA, herein designated VGAM PRECURSOR RNA, and of the diced VGAM139 RNA, herein designated VGAM RNA, and a schematic representation of the secondary folding of VGAM139 folded precursor RNA, herein designated VGAM FOLDED PRECURSOR RNA, of VGAM139 are further described hereinbelow with reference to Table 1.

[1912] Nucleotide sequences of host target binding sites, such as BINDING SITE-I, BINDING SITE-II and BINDING SITE-III of FIG. 1, found on, and schematic representation of the complementarity of each of these host target binding sites to VGAM139 RNA, herein designated VGAM RNA, are described hereinbelow with reference to Table 2.

[1913] FIG. 1 further provides a conceptual description of another novel bioinformatically detected viral gene of the present invention, referred to here as Viral Genomic Address Messenger 140 (VGAM140) viral gene, which modulates expression of respective host target genes thereof, the function and utility of which host target genes is known in the art.

[1914] VGAM140 is a novel bioinformatically detected regulatory, non protein coding, viral micro RNA (miRNA) gene. The method by which VGAM140 was detected is described hereinabove with reference to FIGS. 2-8.

[1915] VGAM140 gene, herein designated VGAM GENE, is a viral gene contained in the genome of Vaccinia virus. VGAM140 host target gene, herein designated VGAM HOST TARGET GENE, is a human gene contained in the human genome.

[1916] VGAM140 gene, herein designated VGAM GENE, encodes a VGAM140 precursor RNA, herein designated VGAM PRECURSOR RNA. Similar to other miRNA genes, and unlike most ordinary genes, VGAM140 precursor RNA, herein designated VGAM PRECURSOR RNA, does not encode a protein. A nucleotide sequence identical or highly similar to the nucleotide sequence of VGAM140 precursor RNA is designated SEQ ID:126, and is provided hereinbelow with reference to the sequence listing part. Nucleotide sequence SEQ ID:126 is located at position 62804 relative to the genome of Vaccinia virus.

[1917] VGAM140 precursor RNA, herein designated VGAM PRECURSOR RNA, folds onto itself, forming VGAM140 folded precursor RNA, herein designated VGAM FOLDED PRECURSOR RNA, which has a two-dimensional hairpin structure. As is well known in the art, this hairpin structure, is typical of RNA encoded by miRNA genes, and is due to the fact that the nucleotide sequence of the first half of the RNA encoded by a miRNA gene is an accurate or partial inversed-reversed sequence of the nucleotide sequence of the second half thereof.

[1918] An enzyme complex designated DICER COMPLEX, dices the VGAM140 folded precursor RNA, herein designated VGAM FOLDED PRECURSOR RNA, into VGAM140 RNA, herein designated VGAM RNA, a single stranded ˜22 nt long RNA segment. As is known in the art, dicing of a hairpin structured RNA precursor product into a short ˜22 nt RNA segment is catalyzed by an enzyme complex comprising an enzyme called Dicer together with other necessary proteins. A probable (over 73%) nucleotide sequence of VGAM140 RNA is designated SEQ ID:475, and is provided hereinbelow with reference to the sequence listing part.

[1919] VGAM140 host target gene, herein designated VGAM HOST TARGET GENE, encodes a corresponding messenger RNA, VGAM140 host target RNA, herein designated VGAM HOST TARGET RNA. VGAM140 host target RNA, herein designated VGAM HOST TARGET RNA, comprises three regions, as is typical of mRNA of a protein coding gene: a 5 untranslated region, a protein coding region and a 3 untranslated region, designated 5UTR, PROTEIN CODING and 3UTR respectively.

[1920] VGAM140 RNA, herein designated VGAM RNA, binds complementarily to one or more host target binding sites located in untranslated regions of VGAM140 host target RNA, herein designated VGAM HOST TARGET RNA. This complementary binding is due to the fact that the nucleotide sequence of VGAM140 RNA, herein designated VGAM RNA, is an accurate or a partial inversed-reversed sequence of the nucleotide sequence of each of the host target binding sites. As an illustration, FIG. 1 shows 3 such host target binding sites, designated BINDING SITE I, BINDING SITE II and BINDING SITE III respectively. It is appreciated that the number of host target binding sites shown in FIG. 1 is meant as an illustration only, and is not meant to be limiting VGAM140 RNA, herein designated VGAM RNA, may have a different number of host target binding sites in untranslated regions of a VGAM140 host target RNA, herein designated VGAM HOST TARGET RNA. It is further appreciated that while FIG. 1 depicts host target binding sites in the 3UTR region, this is meant as an example only these host target binding sites may be located in the 3UTR region, the 5UTR region, or in both 3UTR and 5UTR regions.

[1921] The complementary binding of VGAM140 RNA, herein designated VGAM RNA, to host target binding sites on VGAM140 host target RNA, herein designated VGAM HOST TARGET RNA, such as BINDING SITE I, BINDING SITE II and BINDING SITE III, inhibits translation of VGAM140 host target RNA, herein designated VGAM HOST TARGET RNA, into VGAM140 host target protein, herein designated VGAM HOST TARGET PROTEIN. VGAM host target protein is therefore outlined by a broken line.

[1922] It is appreciated that VGAM140 host target gene, herein designated VGAM HOST TARGET GENE, in fact represents a plurality of VGAM140 host target genes. The mRNA of each one of this plurality of VGAM140 host target genes comprises one or more host target binding sites, each having a nucleotide sequence which is at least partly complementary to VGAM140 RNA, herein designated VGAM RNA, and which when bound by VGAM140 RNA, herein designated VGAM RNA, causes inhibition of translation of respective one or more VGAM140 host target proteins.

[1923] It is further appreciated by one skilled in the art that the mode of translational inhibition illustrated by FIG. 1 with specific reference to translational inhibition exerted by VGAM140 gene, herein designated VGAM GENE, on one or more VGAM140 host target gene, herein designated VGAM HOST TARGET GENE, is in fact common to other known non-viral miRNA genes. As mentioned hereinabove with reference to the background section, although a specific complementary binding site has been demonstrated only for some of the known miRNA genes (primarily Lin-4 and Let-7), all other recently discovered miRNA genes are also believed by those skilled in the art to modulate expression of other genes by complementary binding, although specific complementary binding sites of these other miRNA genes have not yet been found (Ruvkun G., Perspective: Glimpses of a tiny RNA world, Science 294, 779 (2001)).

[1924] It is yet further appreciated that a function of VGAM140 is inhibition of expression of host target genes, as part of a novel viral mechanism of attacking a host. Accordingly, utilities of VGAM140 include diagnosis, prevention and treatment of viral infection by Vaccinia virus. Specific functions, and accordingly utilities, of VGAM140 correlate with, and may be deduced from, the identity of the host target genes which VGAM140 binds and inhibits, and the function of these host target genes, as elaborated hereinbelow.

[1925] Nucleotide sequences of the VGAM140 precursor RNA, herein designated VGAM PRECURSOR RNA, and of the diced VGAM140 RNA, herein designated VGAM RNA, and a schematic representation of the secondary folding of VGAM140 folded precursor RNA, herein designated VGAM FOLDED PRECURSOR RNA, of VGAM140 are further described hereinbelow with reference to Table 1.

[1926] Nucleotide sequences of host target binding sites, such as BINDING SITE-I, BINDING SITE-II and BINDING SITE-III of FIG. 1, found on, and schematic representation of the complementarity of each of these host target binding sites to VGAM140 RNA, herein designated VGAM RNA, are described hereinbelow with reference to Table 2.

[1927] FIG. 1 further provides a conceptual description of another novel bioinformatically detected viral gene of the present invention, referred to here as Viral Genomic Address Messenger 141 (VGAM141) viral gene, which modulates expression of respective host target genes thereof, the function and utility of which host target genes is known in the art.

[1928] VGAM141 is a novel bioinformatically detected regulatory, non protein coding, viral micro RNA (miRNA) gene. The method by which VGAM141 was detected is described hereinabove with reference to FIGS. 2-8.

[1929] VGAM141 gene, herein designated VGAM GENE, is a viral gene contained in the genome of Vaccinia virus. VGAM141 host target gene, herein designated VGAM HOST TARGET GENE, is a human gene contained in the human genome.

[1930] VGAM141 gene, herein designated VGAM GENE, encodes a VGAM141 precursor RNA, herein designated VGAM PRECURSOR RNA. Similar to other miRNA genes, and unlike most ordinary genes, VGAM141 precursor RNA, herein designated VGAM PRECURSOR RNA, does not encode a protein. A nucleotide sequence identical or highly similar to the nucleotide sequence of VGAM141 precursor RNA is designated SEQ ID:127, and is provided hereinbelow with reference to the sequence listing part. Nucleotide sequence SEQ ID:127 is located at position 62395 relative to the genome of Vaccinia virus.

[1931] VGAM141 precursor RNA, herein designated VGAM PRECURSOR RNA, folds onto itself, forming VGAM141 folded precursor RNA, herein designated VGAM FOLDED PRECURSOR RNA, which has a two-dimensional hairpin structure. As is well known in the art, this hairpin structure, is typical of RNA encoded by miRNA genes, and is due to the fact that the nucleotide sequence of the first half of the RNA encoded by a miRNA gene is an accurate or partial inversed-reversed sequence of the nucleotide sequence of the second half thereof.

[1932] An enzyme complex designated DICER COMPLEX, dices the VGAM141 folded precursor RNA, herein designated VGAM FOLDED PRECURSOR RNA, into VGAM141 RNA, herein designated VGAM RNA, a single stranded ˜22 nt long RNA segment. As is known in the art, dicing of a hairpin structured RNA precursor product into a short ˜22 nt RNA segment is catalyzed by an enzyme complex comprising an enzyme called Dicer together with other necessary proteins. A probable (over 70%) nucleotide sequence of VGAM141 RNA is designated SEQ ID:476, and is provided hereinbelow with reference to the sequence listing part.

[1933] VGAM141 host target gene, herein designated VGAM HOST TARGET GENE, encodes a corresponding messenger RNA, VGAM141 host target RNA, herein designated VGAM HOST TARGET RNA. VGAM141 host target RNA, herein designated VGAM HOST TARGET RNA, comprises three regions, as is typical of mRNA of a protein coding gene: a 5 untranslated region, a protein coding region and a 3 untranslated region, designated 5UTR, PROTEIN CODING and 3UTR respectively.

[1934] VGAM141 RNA, herein designated VGAM RNA, binds complementarily to one or more host target binding sites located in untranslated regions of VGAM141 host target RNA, herein designated VGAM HOST TARGET RNA. This complementary binding is due to the fact that the nucleotide sequence of VGAM141 RNA, herein designated VGAM RNA, is an accurate or a partial inversed-reversed sequence of the nucleotide sequence of each of the host target binding sites. As an illustration, FIG. 1 shows 3 such host target binding sites, designated BINDING SITE I, BINDING SITE II and BINDING SITE III respectively. It is appreciated that the number of host target binding sites shown in FIG. 1 is meant as an illustration only, and is not meant to be limiting VGAM141 RNA, herein designated VGAM RNA, may have a different number of host target binding sites in untranslated regions of a VGAM141 host target RNA, herein designated VGAM HOST TARGET RNA. It is further appreciated that while FIG. 1 depicts host target binding sites in the 3UTR region, this is meant as an example only these host target binding sites may be located in the 3UTR region, the 5UTR region, or in both 3UTR and 5UTR regions.

[1935] The complementary binding of VGAM141 RNA, herein designated VGAM RNA, to host target binding sites on VGAM141 host target RNA, herein designated VGAM HOST TARGET RNA, such as BINDING SITE I, BINDING SITE II and BINDING SITE III, inhibits translation of VGAM141 host target RNA, herein designated VGAM HOST TARGET RNA, into VGAM141 host target protein, herein designated VGAM HOST TARGET PROTEIN. VGAM host target protein is therefore outlined by a broken line.

[1936] It is appreciated that VGAM141 host target gene, herein designated VGAM HOST TARGET GENE, in fact represents a plurality of VGAM141 host target genes. The mRNA of each one of this plurality of VGAM141 host target genes comprises one or more host target binding sites, each having a nucleotide sequence which is at least partly complementary to VGAM141 RNA, herein designated VGAM RNA, and which when bound by VGAM141 RNA, herein designated VGAM RNA, causes inhibition of translation of respective one or more VGAM141 host target proteins.

[1937] It is further appreciated by one skilled in the art that the mode of translational inhibition illustrated by FIG. 1 with specific reference to translational inhibition exerted by VGAM141 gene, herein designated VGAM GENE, on one or more VGAM141 host target gene, herein designated VGAM HOST TARGET GENE, is in fact common to other known non-viral miRNA genes. As mentioned hereinabove with reference to the background section, although a specific complementary binding site has been demonstrated only for some of the known miRNA genes (primarily Lin-4 and Let-7), all other recently discovered miRNA genes are also believed by those skilled in the art to modulate expression of other genes by complementary binding, although specific complementary binding sites of these other miRNA genes have not yet been found (Ruvkun G., Perspective: Glimpses of a tiny RNA world, Science 294, 779 (2001)).

[1938] It is yet further appreciated that a function of VGAM141 is inhibition of expression of host target genes, as part of a novel viral mechanism of attacking a host. Accordingly, utilities of VGAM141 include diagnosis, prevention and treatment of viral infection by Vaccinia virus. Specific functions, and accordingly utilities, of VGAM141 correlate with, and may be deduced from, the identity of the host target genes which VGAM141 binds and inhibits, and the function of these host target genes, as elaborated hereinbelow.

[1939] Nucleotide sequences of the VGAM141 precursor RNA, herein designated VGAM PRECURSOR RNA, and of the diced VGAM141 RNA, herein designated VGAM RNA, and a schematic representation of the secondary folding of VGAM141 folded precursor RNA, herein designated VGAM FOLDED PRECURSOR RNA, of VGAM141 are further described hereinbelow with reference to Table 1.

[1940] Nucleotide sequences of host target binding sites, such as BINDING SITE-I, BINDING SITE-II and BINDING SITE-III of FIG. 1, found on, and schematic representation of the complementarity of each of these host target binding sites to VGAM141 RNA, herein designated VGAM RNA, are described hereinbelow with reference to Table 2.

[1941] FIG. 1 further provides a conceptual description of another novel bioinformatically detected viral gene of the present invention, referred to here as Viral Genomic Address Messenger 142 (VGAM142) viral gene, which modulates expression of respective host target genes thereof, the function and utility of which host target genes is known in the art.

[1942] VGAM142 is a novel bioinformatically detected regulatory, non protein coding, viral micro RNA (miRNA) gene. The method by which VGAM142 was detected is described hereinabove with reference to FIGS. 2-8.

[1943] VGAM142 gene, herein designated VGAM GENE, is a viral gene contained in the genome of Vaccinia virus. VGAM142 host target gene, herein designated VGAM HOST TARGET GENE, is a human gene contained in the human genome.

[1944] VGAM142 gene, herein designated VGAM GENE, encodes a VGAM142 precursor RNA, herein designated VGAM PRECURSOR RNA. Similar to other miRNA genes, and unlike most ordinary genes, VGAM142 precursor RNA, herein designated VGAM PRECURSOR RNA, does not encode a protein. A nucleotide sequence identical or highly similar to the nucleotide sequence of VGAM142 precursor RNA is designated SEQ ID:128, and is provided hereinbelow with reference to the sequence listing part. Nucleotide sequence SEQ ID:128 is located at position 67919 relative to the genome of Vaccinia virus.

[1945] VGAM142 precursor RNA, herein designated VGAM PRECURSOR RNA, folds onto itself, forming VGAM142 folded precursor RNA, herein designated VGAM FOLDED PRECURSOR RNA, which has a two-dimensional hairpin structure. As is well known in the art, this hairpin structure, is typical of RNA encoded by miRNA genes, and is due to the fact that the nucleotide sequence of the first half of the RNA encoded by a miRNA gene is an accurate or partial inversed-reversed sequence of the nucleotide sequence of the second half thereof.

[1946] An enzyme complex designated DICER COMPLEX, dices the VGAM142 folded precursor RNA, herein designated VGAM FOLDED PRECURSOR RNA, into VGAM142 RNA, herein designated VGAM RNA, a single stranded ˜22 nt long RNA segment. As is known in the art, dicing of a hairpin structured RNA precursor product into a short ˜22 nt RNA segment is catalyzed by an enzyme complex comprising an enzyme called Dicer together with other necessary proteins. A probable (over 73%) nucleotide sequence of VGAM142 RNA is designated SEQ ID:477, and is provided hereinbelow with reference to the sequence listing part.

[1947] VGAM142 host target gene, herein designated VGAM HOST TARGET GENE, encodes a corresponding messenger RNA, VGAM142 host target RNA, herein designated VGAM HOST TARGET RNA. VGAM142 host target RNA, herein designated VGAM HOST TARGET RNA, comprises three regions, as is typical of mRNA of a protein coding gene: a 5 untranslated region, a protein coding region and a 3 untranslated region, designated 5UTR, PROTEIN CODING and 3UTR respectively.

[1948] VGAM142 RNA, herein designated VGAM RNA, binds complementarily to one or more host target binding sites located in untranslated regions of VGAM142 host target RNA, herein designated VGAM HOST TARGET RNA. This complementary binding is due to the fact that the nucleotide sequence of VGAM142 RNA, herein designated VGAM RNA, is an accurate or a partial inversed-reversed sequence of the nucleotide sequence of each of the host target binding sites. As an illustration, FIG. 1 shows 3 such host target binding sites, designated BINDING SITE I, BINDING SITE II and BINDING SITE III respectively. It is appreciated that the number of host target binding sites shown in FIG. 1 is meant as an illustration only, and is not meant to be limiting VGAM142 RNA, herein designated VGAM RNA, may have a different number of host target binding sites in untranslated regions of a VGAM142 host target RNA, herein designated VGAM HOST TARGET RNA. It is further appreciated that while FIG. 1 depicts host target binding sites in the 3UTR region, this is meant as an example only these host target binding sites may be located in the 3UTR region, the 5UTR region, or in both 3UTR and 5UTR regions.

[1949] The complementary binding of VGAM142 RNA, herein designated VGAM RNA, to host target binding sites on VGAM142 host target RNA, herein designated VGAM HOST TARGET RNA, such as BINDING SITE I, BINDING SITE II and BINDING SITE III, inhibits translation of VGAM142 host target RNA, herein designated VGAM HOST TARGET RNA, into VGAM142 host target protein, herein designated VGAM HOST TARGET PROTEIN. VGAM host target protein is therefore outlined by a broken line.

[1950] It is appreciated that VGAM142 host target gene, herein designated VGAM HOST TARGET GENE, in fact represents a plurality of VGAM142 host target genes. The mRNA of each one of this plurality of VGAM142 host target genes comprises one or more host target binding sites, each having a nucleotide sequence which is at least partly complementary to VGAM142 RNA, herein designated VGAM RNA, and which when bound by VGAM142 RNA, herein designated VGAM RNA, causes inhibition of translation of respective one or more VGAM142 host target proteins.

[1951] It is further appreciated by one skilled in the art that the mode of translational inhibition illustrated by FIG. 1 with specific reference to translational inhibition exerted by VGAM142 gene, herein designated VGAM GENE, on one or more VGAM142 host target gene, herein designated VGAM HOST TARGET GENE, is in fact common to other known non-viral miRNA genes. As mentioned hereinabove with reference to the background section, although a specific complementary binding site has been demonstrated only for some of the known miRNA genes (primarily Lin-4 and Let-7), all other recently discovered miRNA genes are also believed by those skilled in the art to modulate expression of other genes by complementary binding, although specific complementary binding sites of these other miRNA genes have not yet been found (Ruvkun G., Perspective: Glimpses of a tiny RNA world, Science 294, 779 (2001)).

[1952] It is yet further appreciated that a function of VGAM142 is inhibition of expression of host target genes, as part of a novel viral mechanism of attacking a host. Accordingly, utilities of VGAM142 include diagnosis, prevention and treatment of viral infection by Vaccinia virus. Specific functions, and accordingly utilities, of VGAM142 correlate with, and may be deduced from, the identity of the host target genes which VGAM142 binds and inhibits, and the function of these host target genes, as elaborated hereinbelow.

[1953] Nucleotide sequences of the VGAM142 precursor RNA, herein designated VGAM PRECURSOR RNA, and of the diced VGAM142 RNA, herein designated VGAM RNA, and a schematic representation of the secondary folding of VGAM142 folded precursor RNA, herein designated VGAM FOLDED PRECURSOR RNA, of VGAM142 are further described hereinbelow with reference to Table 1.

[1954] Nucleotide sequences of host target binding sites, such as BINDING SITE-I, BINDING SITE-II and BINDING SITE-III of FIG. 1, found on, and schematic representation of the complementarity of each of these host target binding sites to VGAM142 RNA, herein designated VGAM RNA, are described hereinbelow with reference to Table 2.

[1955] FIG. 1 further provides a conceptual description of another novel bioinformatically detected viral gene of the present invention, referred to here as Viral Genomic Address Messenger 143 (VGAM143) viral gene, which modulates expression of respective host target genes thereof, the function and utility of which host target genes is known in the art.

[1956] VGAM143 is a novel bioinformatically detected regulatory, non protein coding, viral micro RNA (miRNA) gene. The method by which VGAM143 was detected is described hereinabove with reference to FIGS. 2-8.

[1957] VGAM143 gene, herein designated VGAM GENE, is a viral gene contained in the genome of Vaccinia virus. VGAM143 host target gene, herein designated VGAM HOST TARGET GENE, is a human gene contained in the human genome.

[1958] VGAM143 gene, herein designated VGAM GENE, encodes a VGAM143 precursor RNA, herein designated VGAM PRECURSOR RNA. Similar to other miRNA genes, and unlike most ordinary genes, VGAM143 precursor RNA, herein designated VGAM PRECURSOR RNA, does not encode a protein. A nucleotide sequence identical or highly similar to the nucleotide sequence of VGAM143 precursor RNA is designated SEQ ID:129, and is provided hereinbelow with reference to the sequence listing part. Nucleotide sequence SEQ ID:129 is located at position 69887 relative to the genome of Vaccinia virus.

[1959] VGAM143 precursor RNA, herein designated VGAM PRECURSOR RNA, folds onto itself, forming VGAM143 folded precursor RNA, herein designated VGAM FOLDED PRECURSOR RNA, which has a two-dimensional hairpin structure. As is well known in the art, this hairpin structure, is typical of RNA encoded by miRNA genes, and is due to the fact that the nucleotide sequence of the first half of the RNA encoded by a miRNA gene is an accurate or partial inversed-reversed sequence of the nucleotide sequence of the second half thereof.

[1960] An enzyme complex designated DICER COMPLEX, dices the VGAM143 folded precursor RNA, herein designated VGAM FOLDED PRECURSOR RNA, into VGAM143 RNA, herein designated VGAM RNA, a single stranded ˜22 nt long RNA segment. As is known in the art, dicing of a hairpin structured RNA precursor product into a short ˜22 nt RNA segment is catalyzed by an enzyme complex comprising an enzyme called Dicer together with other necessary proteins. A probable (over 25%) nucleotide sequence of VGAM143 RNA is designated SEQ ID:478, and is provided hereinbelow with reference to the sequence listing part.

[1961] VGAM143 host target gene, herein designated VGAM HOST TARGET GENE, encodes a corresponding messenger RNA, VGAM143 host target RNA, herein designated VGAM HOST TARGET RNA. VGAM143 host target RNA, herein designated VGAM HOST TARGET RNA, comprises three regions, as is typical of mRNA of a protein coding gene: a 5 untranslated region, a protein coding region and a 3 untranslated region, designated 5UTR, PROTEIN CODING and 3UTR respectively.

[1962] VGAM143 RNA, herein designated VGAM RNA, binds complementarily to one or more host target binding sites located in untranslated regions of VGAM143 host target RNA, herein designated VGAM HOST TARGET RNA. This complementary binding is due to the fact that the nucleotide sequence of VGAM143 RNA, herein designated VGAM RNA, is an accurate or a partial inversed-reversed sequence of the nucleotide sequence of each of the host target binding sites. As an illustration, FIG. 1 shows 3 such host target binding sites, designated BINDING SITE I, BINDING SITE II and BINDING SITE III respectively. It is appreciated that the number of host target binding sites shown in FIG. 1 is meant as an illustration only, and is not meant to be limiting VGAM143 RNA, herein designated VGAM RNA, may have a different number of host target binding sites in untranslated regions of a VGAM143 host target RNA, herein designated VGAM HOST TARGET RNA. It is further appreciated that while FIG. 1 depicts host target binding sites in the 3UTR region, this is meant as an example only these host target binding sites may be located in the 3UTR region, the 5UTR region, or in both 3UTR and 5UTR regions.

[1963] The complementary binding of VGAM143 RNA, herein designated VGAM RNA, to host target binding sites on VGAM143 host target RNA, herein designated VGAM HOST TARGET RNA, such as BINDING SITE I, BINDING SITE II and BINDING SITE III, inhibits translation of VGAM143 host target RNA, herein designated VGAM HOST TARGET RNA, into VGAM143 host target protein, herein designated VGAM HOST TARGET PROTEIN. VGAM host target protein is therefore outlined by a broken line.

[1964] It is appreciated that VGAM143 host target gene, herein designated VGAM HOST TARGET GENE, in fact represents a plurality of VGAM143 host target genes. The mRNA of each one of this plurality of VGAM143 host target genes comprises one or more host target binding sites, each having a nucleotide sequence which is at least partly complementary to VGAM143 RNA, herein designated VGAM RNA, and which when bound by VGAM143 RNA, herein designated VGAM RNA, causes inhibition of translation of respective one or more VGAM143 host target proteins.

[1965] It is further appreciated by one skilled in the art that the mode of translational inhibition illustrated by FIG. 1 with specific reference to translational inhibition exerted by VGAM143 gene, herein designated VGAM GENE, on one or more VGAM143 host target gene, herein designated VGAM HOST TARGET GENE, is in fact common to other known non-viral miRNA genes. As mentioned hereinabove with reference to the background section, although a specific complementary binding site has been demonstrated only for some of the known miRNA genes (primarily Lin-4 and Let-7), all other recently discovered miRNA genes are also believed by those skilled in the art to modulate expression of other genes by complementary binding, although specific complementary binding sites of these other miRNA genes have not yet been found (Ruvkun G., Perspective: Glimpses of a tiny RNA world, Science 294, 779 (2001)).

[1966] It is yet further appreciated that a function of VGAM143 is inhibition of expression of host target genes, as part of a novel viral mechanism of attacking a host. Accordingly, utilities of VGAM143 include diagnosis, prevention and treatment of viral infection by Vaccinia virus. Specific functions, and accordingly utilities, of VGAM143 correlate with, and may be deduced from, the identity of the host target genes which VGAM143 binds and inhibits, and the function of these host target genes, as elaborated hereinbelow.

[1967] Nucleotide sequences of the VGAM143 precursor RNA, herein designated VGAM PRECURSOR RNA, and of the diced VGAM143 RNA, herein designated VGAM RNA, and a schematic representation of the secondary folding of VGAM143 folded precursor RNA, herein designated VGAM FOLDED PRECURSOR RNA, of VGAM143 are further described hereinbelow with reference to Table 1.

[1968] Nucleotide sequences of host target binding sites, such as BINDING SITE-I, BINDING SITE-II and BINDING SITE-III of FIG. 1, found on, and schematic representation of the complementarity of each of these host target binding sites to VGAM143 RNA, herein designated VGAM RNA, are described hereinbelow with reference to Table 2.

[1969] FIG. 1 further provides a conceptual description of another novel bioinformatically detected viral gene of the present invention, referred to here as Viral Genomic Address Messenger 144 (VGAM144) viral gene, which modulates expression of respective host target genes thereof, the function and utility of which host target genes is known in the art.

[1970] VGAM144 is a novel bioinformatically detected regulatory, non protein coding, viral micro RNA (miRNA) gene. The method by which VGAM144 was detected is described hereinabove with reference to FIGS. 2-8.

[1971] VGAM144 gene, herein designated VGAM GENE, is a viral gene contained in the genome of Vaccinia virus. VGAM144 host target gene, herein designated VGAM HOST TARGET GENE, is a human gene contained in the human genome.

[1972] VGAM144 gene, herein designated VGAM GENE, encodes a VGAM144 precursor RNA, herein designated VGAM PRECURSOR RNA. Similar to other miRNA genes, and unlike most ordinary genes, VGAM144 precursor RNA, herein designated VGAM PRECURSOR RNA, does not encode a protein. A nucleotide sequence identical or highly similar to the nucleotide sequence of VGAM144 precursor RNA is designated SEQ ID:130, and is provided hereinbelow with reference to the sequence listing part. Nucleotide sequence SEQ ID:130 is located at position 68429 relative to the genome of Vaccinia virus.

[1973] VGAM144 precursor RNA, herein designated VGAM PRECURSOR RNA, folds onto itself, forming VGAM144 folded precursor RNA, herein designated VGAM FOLDED PRECURSOR RNA, which has a two-dimensional hairpin structure. As is well known in the art, this hairpin structure, is typical of RNA encoded by miRNA genes, and is due to the fact that the nucleotide sequence of the first half of the RNA encoded by a miRNA gene is an accurate or partial inversed-reversed sequence of the nucleotide sequence of the second half thereof.

[1974] An enzyme complex designated DICER COMPLEX, dices the VGAM144 folded precursor RNA, herein designated VGAM FOLDED PRECURSOR RNA, into VGAM144 RNA, herein designated VGAM RNA, a single stranded ˜22 nt long RNA segment. As is known in the art, dicing of a hairpin structured RNA precursor product into a short ˜22 nt RNA segment is catalyzed by an enzyme complex comprising an enzyme called Dicer together with other necessary proteins. A probable (over 85%) nucleotide sequence of VGAM144 RNA is designated SEQ ID:479, and is provided hereinbelow with reference to the sequence listing part.

[1975] VGAM144 host target gene, herein designated VGAM HOST TARGET GENE, encodes a corresponding messenger RNA, VGAM144 host target RNA, herein designated VGAM HOST TARGET RNA. VGAM144 host target RNA, herein designated VGAM HOST TARGET RNA, comprises three regions, as is typical of mRNA of a protein coding gene: a 5 untranslated region, a protein coding region and a 3 untranslated region, designated 5UTR, PROTEIN CODING and 3UTR respectively.

[1976] VGAM144 RNA, herein designated VGAM RNA, binds complementarily to one or more host target binding sites located in untranslated regions of VGAM144 host target RNA, herein designated VGAM HOST TARGET RNA. This complementary binding is due to the fact that the nucleotide sequence of VGAM144 RNA, herein designated VGAM RNA, is an accurate or a partial inversed-reversed sequence of the nucleotide sequence of each of the host target binding sites. As an illustration, FIG. 1 shows 3 such host target binding sites, designated BINDING SITE I, BINDING SITE II and BINDING SITE III respectively. It is appreciated that the number of host target binding sites shown in FIG. 1 is meant as an illustration only, and is not meant to be limiting VGAM144 RNA, herein designated VGAM RNA, may have a different number of host target binding sites in untranslated regions of a VGAM144 host target RNA, herein designated VGAM HOST TARGET RNA. It is further appreciated that while FIG. 1 depicts host target binding sites in the 3UTR region, this is meant as an example only these host target binding sites may be located in the 3UTR region, the 5UTR region, or in both 3UTR and 5UTR regions.

[1977] The complementary binding of VGAM144 RNA, herein designated VGAM RNA, to host target binding sites on VGAM144 host target RNA, herein designated VGAM HOST TARGET RNA, such as BINDING SITE I, BINDING SITE II and BINDING SITE III, inhibits translation of VGAM144 host target RNA, herein designated VGAM HOST TARGET RNA, into VGAM144 host target protein, herein designated VGAM HOST TARGET PROTEIN. VGAM host target protein is therefore outlined by a broken line.

[1978] It is appreciated that VGAM144 host target gene, herein designated VGAM HOST TARGET GENE, in fact represents a plurality of VGAM144 host target genes. The mRNA of each one of this plurality of VGAM144 host target genes comprises one or more host target binding sites, each having a nucleotide sequence which is at least partly complementary to VGAM144 RNA, herein designated VGAM RNA, and which when bound by VGAM144 RNA, herein designated VGAM RNA, causes inhibition of translation of respective one or more VGAM144 host target proteins.

[1979] It is further appreciated by one skilled in the art that the mode of translational inhibition illustrated by FIG. 1 with specific reference to translational inhibition exerted by VGAM144 gene, herein designated VGAM GENE, on one or more VGAM144 host target gene, herein designated VGAM HOST TARGET GENE, is in fact common to other known non-viral miRNA genes. As mentioned hereinabove with reference to the background section, although a specific complementary binding site has been demonstrated only for some of the known miRNA genes (primarily Lin-4 and Let-7), all other recently discovered miRNA genes are also believed by those skilled in the art to modulate expression of other genes by complementary binding, although specific complementary binding sites of these other miRNA genes have not yet been found (Ruvkun G., Perspective: Glimpses of a tiny RNA world, Science 294, 779 (2001)).

[1980] It is yet further appreciated that a function of VGAM144 is inhibition of expression of host target genes, as part of a novel viral mechanism of attacking a host. Accordingly, utilities of VGAM144 include diagnosis, prevention and treatment of viral infection by Vaccinia virus. Specific functions, and accordingly utilities, of VGAM144 correlate with, and may be deduced from, the identity of the host target genes which VGAM144 binds and inhibits, and the function of these host target genes, as elaborated hereinbelow.

[1981] Nucleotide sequences of the VGAM144 precursor RNA, herein designated VGAM PRECURSOR RNA, and of the diced VGAM144 RNA, herein designated VGAM RNA, and a schematic representation of the secondary folding of VGAM144 folded precursor RNA, herein designated VGAM FOLDED PRECURSOR RNA, of VGAM144 are further described hereinbelow with reference to Table 1.

[1982] Nucleotide sequences of host target binding sites, such as BINDING SITE-I, BINDING SITE-II and BINDING SITE-III of FIG. 1, found on, and schematic representation of the complementarity of each of these host target binding sites to VGAM144 RNA, herein designated VGAM RNA, are described hereinbelow with reference to Table 2.

[1983] FIG. 1 further provides a conceptual description of another novel bioinformatically detected viral gene of the present invention, referred to here as Viral Genomic Address Messenger 145 (VGAM145) viral gene, which modulates expression of respective host target genes thereof, the function and utility of which host target genes is known in the art.

[1984] VGAM145 is a novel bioinformatically detected regulatory, non protein coding, viral micro RNA (miRNA) gene. The method by which VGAM145 was detected is described hereinabove with reference to FIGS. 2-8.

[1985] VGAM145 gene, herein designated VGAM GENE, is a viral gene contained in the genome of Vaccinia virus. VGAM145 host target gene, herein designated VGAM HOST TARGET GENE, is a human gene contained in the human genome.

[1986] VGAM145 gene, herein designated VGAM GENE, encodes a VGAM145 precursor RNA, herein designated VGAM PRECURSOR RNA. Similar to other miRNA genes, and unlike most ordinary genes, VGAM145 precursor RNA, herein designated VGAM PRECURSOR RNA, does not encode a protein. A nucleotide sequence identical or highly similar to the nucleotide sequence of VGAM145 precursor RNA is designated SEQ ID:131, and is provided hereinbelow with reference to the sequence listing part. Nucleotide sequence SEQ ID:131 is located at position 67126 relative to the genome of Vaccinia virus.

[1987] VGAM145 precursor RNA, herein designated VGAM PRECURSOR RNA, folds onto itself, forming VGAM145 folded precursor RNA, herein designated VGAM FOLDED PRECURSOR RNA, which has a two-dimensional hairpin structure. As is well known in the art, this hairpin structure, is typical of RNA encoded by miRNA genes, and is due to the fact that the nucleotide sequence of the first half of the RNA encoded by a miRNA gene is an accurate or partial inversed-reversed sequence of the nucleotide sequence of the second half thereof.

[1988] An enzyme complex designated DICER COMPLEX, dices the VGAM145 folded precursor RNA, herein designated VGAM FOLDED PRECURSOR RNA, into VGAM145 RNA, herein designated VGAM RNA, a single stranded ˜22 nt long RNA segment. As is known in the art, dicing of a hairpin structured RNA precursor product into a short ˜22 nt RNA segment is catalyzed by an enzyme complex comprising an enzyme called Dicer together with other necessary proteins. A probable (over 76%) nucleotide sequence of VGAM145 RNA is designated SEQ ID:480, and is provided hereinbelow with reference to the sequence listing part.

[1989] VGAM145 host target gene, herein designated VGAM HOST TARGET GENE, encodes a corresponding messenger RNA, VGAM145 host target RNA, herein designated VGAM HOST TARGET RNA. VGAM145 host target RNA, herein designated VGAM HOST TARGET RNA, comprises three regions, as is typical of mRNA of a protein coding gene: a 5 untranslated region, a protein coding region and a 3 untranslated region, designated 5UTR, PROTEIN CODING and 3UTR respectively.

[1990] VGAM145 RNA, herein designated VGAM RNA, binds complementarily to one or more host target binding sites located in untranslated regions of VGAM145 host target RNA, herein designated VGAM HOST TARGET RNA. This complementary binding is due to the fact that the nucleotide sequence of VGAM145 RNA, herein designated VGAM RNA, is an accurate or a partial inversed-reversed sequence of the nucleotide sequence of each of the host target binding sites. As an illustration, FIG. 1 shows 3 such host target binding sites, designated BINDING SITE I, BINDING SITE II and BINDING SITE III respectively. It is appreciated that the number of host target binding sites shown in FIG. 1 is meant as an illustration only, and is not meant to be limiting VGAM145 RNA, herein designated VGAM RNA, may have a different number of host target binding sites in untranslated regions of a VGAM145 host target RNA, herein designated VGAM HOST TARGET RNA. It is further appreciated that while FIG. 1 depicts host target binding sites in the 3UTR region, this is meant as an example only these host target binding sites may be located in the 3UTR region, the 5UTR region, or in both 3UTR and 5UTR regions.

[1991] The complementary binding of VGAM145 RNA, herein designated VGAM RNA, to host target binding sites on VGAM145 host target RNA, herein designated VGAM HOST TARGET RNA, such as BINDING SITE I, BINDING SITE II and BINDING SITE III, inhibits translation of VGAM145 host target RNA, herein designated VGAM HOST TARGET RNA, into VGAM145 host target protein, herein designated VGAM HOST TARGET PROTEIN. VGAM host target protein is therefore outlined by a broken line.

[1992] It is appreciated that VGAM145 host target gene, herein designated VGAM HOST TARGET GENE, in fact represents a plurality of VGAM145 host target genes. The mRNA of each one of this plurality of VGAM145 host target genes comprises one or more host target binding sites, each having a nucleotide sequence which is at least partly complementary to VGAM145 RNA, herein designated VGAM RNA, and which when bound by VGAM145 RNA, herein designated VGAM RNA, causes inhibition of translation of respective one or more VGAM145 host target proteins.

[1993] It is further appreciated by one skilled in the art that the mode of translational inhibition illustrated by FIG. 1 with specific reference to translational inhibition exerted by VGAM145 gene, herein designated VGAM GENE, on one or more VGAM145 host target gene, herein designated VGAM HOST TARGET GENE, is in fact common to other known non-viral miRNA genes. As mentioned hereinabove with reference to the background section, although a specific complementary binding site has been demonstrated only for some of the known miRNA genes (primarily Lin-4 and Let-7), all other recently discovered miRNA genes are also believed by those skilled in the art to modulate expression of other genes by complementary binding, although specific complementary binding sites of these other miRNA genes have not yet been found (Ruvkun G., Perspective: Glimpses of a tiny RNA world, Science 294, 779 (2001)).

[1994] It is yet further appreciated that a function of VGAM145 is inhibition of expression of host target genes, as part of a novel viral mechanism of attacking a host. Accordingly, utilities of VGAM145 include diagnosis, prevention and treatment of viral infection by Vaccinia virus. Specific functions, and accordingly utilities, of VGAM145 correlate with, and may be deduced from, the identity of the host target genes which VGAM145 binds and inhibits, and the function of these host target genes, as elaborated hereinbelow.

[1995] Nucleotide sequences of the VGAM145 precursor RNA, herein designated VGAM PRECURSOR RNA, and of the diced VGAM145 RNA, herein designated VGAM RNA, and a schematic representation of the secondary folding of VGAM145 folded precursor RNA, herein designated VGAM FOLDED PRECURSOR RNA, of VGAM145 are further described hereinbelow with reference to Table 1.

[1996] Nucleotide sequences of host target binding sites, such as BINDING SITE-I, BINDING SITE-II and BINDING SITE-III of FIG. 1, found on, and schematic representation of the complementarity of each of these host target binding sites to VGAM145 RNA, herein designated VGAM RNA, are described hereinbelow with reference to Table 2.

[1997] FIG. 1 further provides a conceptual description of another novel bioinformatically detected viral gene of the present invention, referred to here as Viral Genomic Address Messenger 146 (VGAM146) viral gene, which modulates expression of respective host target genes thereof, the function and utility of which host target genes is known in the art.

[1998] VGAM146 is a novel bioinformatically detected regulatory, non protein coding, viral micro RNA (miRNA) gene. The method by which VGAM146 was detected is described hereinabove with reference to FIGS. 2-8.

[1999] VGAM146 gene, herein designated VGAM GENE, is a viral gene contained in the genome of Vaccinia virus. VGAM146 host target gene, herein designated VGAM HOST TARGET GENE, is a human gene contained in the human genome.

[2000] VGAM146 gene, herein designated VGAM GENE, encodes a VGAM146 precursor RNA, herein designated VGAM PRECURSOR RNA. Similar to other miRNA genes, and unlike most ordinary genes, VGAM146 precursor RNA, herein designated VGAM PRECURSOR RNA, does not encode a protein. A nucleotide sequence identical or highly similar to the nucleotide sequence of VGAM146 precursor RNA is designated SEQ ID:132, and is provided hereinbelow with reference to the sequence listing part. Nucleotide sequence SEQ ID:132 is located at position 69412 relative to the genome of Vaccinia virus.

[2001] VGAM146 precursor RNA, herein designated VGAM PRECURSOR RNA, folds onto itself, forming VGAM146 folded precursor RNA, herein designated VGAM FOLDED PRECURSOR RNA, which has a two-dimensional hairpin structure. As is well known in the art, this hairpin structure, is typical of RNA encoded by miRNA genes, and is due to the fact that the nucleotide sequence of the first half of the RNA encoded by a miRNA gene is an accurate or partial inversed-reversed sequence of the nucleotide sequence of the second half thereof.

[2002] An enzyme complex designated DICER COMPLEX, dices the VGAM146 folded precursor RNA, herein designated VGAM FOLDED PRECURSOR RNA, into VGAM146 RNA, herein designated VGAM RNA, a single stranded ˜22 nt long RNA segment. As is known in the art, dicing of a hairpin structured RNA precursor product into a short ˜22 nt RNA segment is catalyzed by an enzyme complex comprising an enzyme called Dicer together with other necessary proteins. A probable (over 92%) nucleotide sequence of VGAM146 RNA is designated SEQ ID:481, and is provided hereinbelow with reference to the sequence listing part.

[2003] VGAM146 host target gene, herein designated VGAM HOST TARGET GENE, encodes a corresponding messenger RNA, VGAM146 host target RNA, herein designated VGAM HOST TARGET RNA. VGAM146 host target RNA, herein designated VGAM HOST TARGET RNA, comprises three regions, as is typical of mRNA of a protein coding gene: a 5 untranslated region, a protein coding region and a 3 untranslated region, designated 5UTR, PROTEIN CODING and 3UTR respectively.

[2004] VGAM146 RNA, herein designated VGAM RNA, binds complementarily to one or more host target binding sites located in untranslated regions of VGAM146 host target RNA, herein designated VGAM HOST TARGET RNA. This complementary binding is due to the fact that the nucleotide sequence of VGAM146 RNA, herein designated VGAM RNA, is an accurate or a partial inversed-reversed sequence of the nucleotide sequence of each of the host target binding sites. As an illustration, FIG. 1 shows 3 such host target binding sites, designated BINDING SITE I, BINDING SITE II and BINDING SITE III respectively. It is appreciated that the number of host target binding sites shown in FIG. 1 is meant as an illustration only, and is not meant to be limiting VGAM146 RNA, herein designated VGAM RNA, may have a different number of host target binding sites in untranslated regions of a VGAM146 host target RNA, herein designated VGAM HOST TARGET RNA. It is further appreciated that while FIG. 1 depicts host target binding sites in the 3UTR region, this is meant as an example only these host target binding sites may be located in the 3UTR region, the 5UTR region, or in both 3UTR and 5UTR regions.

[2005] The complementary binding of VGAM146 RNA, herein designated VGAM RNA, to host target binding sites on VGAM146 host target RNA, herein designated VGAM HOST TARGET RNA, such as BINDING SITE I, BINDING SITE II and BINDING SITE III, inhibits translation of VGAM146 host target RNA, herein designated VGAM HOST TARGET RNA, into VGAM146 host target protein, herein designated VGAM HOST TARGET PROTEIN. VGAM host target protein is therefore outlined by a broken line.

[2006] It is appreciated that VGAM146 host target gene, herein designated VGAM HOST TARGET GENE, in fact represents a plurality of VGAM146 host target genes. The mRNA of each one of this plurality of VGAM146 host target genes comprises one or more host target binding sites, each having a nucleotide sequence which is at least partly complementary to VGAM146 RNA, herein designated VGAM RNA, and which when bound by VGAM146 RNA, herein designated VGAM RNA, causes inhibition of translation of respective one or more VGAM146 host target proteins.

[2007] It is further appreciated by one skilled in the art that the mode of translational inhibition illustrated by FIG. 1 with specific reference to translational inhibition exerted by VGAM146 gene, herein designated VGAM GENE, on one or more VGAM146 host target gene, herein designated VGAM HOST TARGET GENE, is in fact common to other known non-viral miRNA genes. As mentioned hereinabove with reference to the background section, although a specific complementary binding site has been demonstrated only for some of the known miRNA genes (primarily Lin-4 and Let-7), all other recently discovered miRNA genes are also believed by those skilled in the art to modulate expression of other genes by complementary binding, although specific complementary binding sites of these other miRNA genes have not yet been found (Ruvkun G., Perspective: Glimpses of a tiny RNA world, Science 294, 779 (2001)).

[2008] It is yet further appreciated that a function of VGAM146 is inhibition of expression of host target genes, as part of a novel viral mechanism of attacking a host. Accordingly, utilities of VGAM146 include diagnosis, prevention and treatment of viral infection by Vaccinia virus. Specific functions, and accordingly utilities, of VGAM146 correlate with, and may be deduced from, the identity of the host target genes which VGAM146 binds and inhibits, and the function of these host target genes, as elaborated hereinbelow.

[2009] Nucleotide sequences of the VGAM146 precursor RNA, herein designated VGAM PRECURSOR RNA, and of the diced VGAM146 RNA, herein designated VGAM RNA, and a schematic representation of the secondary folding of VGAM146 folded precursor RNA, herein designated VGAM FOLDED PRECURSOR RNA, of VGAM146 are further described hereinbelow with reference to Table 1.

[2010] Nucleotide sequences of host target binding sites, such as BINDING SITE-I, BINDING SITE-II and BINDING SITE-III of FIG. 1, found on, and schematic representation of the complementarity of each of these host target binding sites to VGAM146 RNA, herein designated VGAM RNA, are described hereinbelow with reference to Table 2.

[2011] FIG. 1 further provides a conceptual description of another novel bioinformatically detected viral gene of the present invention, referred to here as Viral Genomic Address Messenger 147 (VGAM147) viral gene, which modulates expression of respective host target genes thereof, the function and utility of which host target genes is known in the art.

[2012] VGAM147 is a novel bioinformatically detected regulatory, non protein coding, viral micro RNA (miRNA) gene. The method by which VGAM147 was detected is described hereinabove with reference to FIGS. 2-8.

[2013] VGAM147 gene, herein designated VGAM GENE, is a viral gene contained in the genome of Vaccinia virus. VGAM147 host target gene, herein designated VGAM HOST TARGET GENE, is a human gene contained in the human genome.

[2014] VGAM147 gene, herein designated VGAM GENE, encodes a VGAM147 precursor RNA, herein designated VGAM PRECURSOR RNA. Similar to other miRNA genes, and unlike most ordinary genes, VGAM147 precursor RNA, herein designated VGAM PRECURSOR RNA, does not encode a protein. A nucleotide sequence identical or highly similar to the nucleotide sequence of VGAM147 precursor RNA is designated SEQ ID:133, and is provided hereinbelow with reference to the sequence listing part. Nucleotide sequence SEQ ID:133 is located at position 66394 relative to the genome of Vaccinia virus.

[2015] VGAM147 precursor RNA, herein designated VGAM PRECURSOR RNA, folds onto itself, forming VGAM147 folded precursor RNA, herein designated VGAM FOLDED PRECURSOR RNA, which has a two-dimensional hairpin structure. As is well known in the art, this hairpin structure, is typical of RNA encoded by miRNA genes, and is due to the fact that the nucleotide sequence of the first half of the RNA encoded by a miRNA gene is an accurate or partial inversed-reversed sequence of the nucleotide sequence of the second half thereof.

[2016] An enzyme complex designated DICER COMPLEX, dices the VGAM147 folded precursor RNA, herein designated VGAM FOLDED PRECURSOR RNA, into VGAM147 RNA, herein designated VGAM RNA, a single stranded ˜22 nt long RNA segment. As is known in the art, dicing of a hairpin structured RNA precursor product into a short ˜22 nt RNA segment is catalyzed by an enzyme complex comprising an enzyme called Dicer together with other necessary proteins. A probable (over 76%) nucleotide sequence of VGAM147 RNA is designated SEQ ID:482, and is provided hereinbelow with reference to the sequence listing part.

[2017] VGAM147 host target gene, herein designated VGAM HOST TARGET GENE, encodes a corresponding messenger RNA, VGAM147 host target RNA, herein designated VGAM HOST TARGET RNA. VGAM147 host target RNA, herein designated VGAM HOST TARGET RNA, comprises three regions, as is typical of mRNA of a protein coding gene: a 5 untranslated region, a protein coding region and a 3 untranslated region, designated 5UTR, PROTEIN CODING and 3UTR respectively.

[2018] VGAM147 RNA, herein designated VGAM RNA, binds complementarily to one or more host target binding sites located in untranslated regions of VGAM147 host target RNA, herein designated VGAM HOST TARGET RNA. This complementary binding is due to the fact that the nucleotide sequence of VGAM147 RNA, herein designated VGAM RNA, is an accurate or a partial inversed-reversed sequence of the nucleotide sequence of each of the host target binding sites. As an illustration, FIG. 1 shows 3 such host target binding sites, designated BINDING SITE I, BINDING SITE II and BINDING SITE III respectively. It is appreciated that the number of host target binding sites shown in FIG. 1 is meant as an illustration only, and is not meant to be limiting VGAM147 RNA, herein designated VGAM RNA, may have a different number of host target binding sites in untranslated regions of a VGAM147 host target RNA, herein designated VGAM HOST TARGET RNA. It is further appreciated that while FIG. 1 depicts host target binding sites in the 3UTR region, this is meant as an example only these host target binding sites may be located in the 3UTR region, the 5UTR region, or in both 3UTR and 5UTR regions.

[2019] The complementary binding of VGAM147 RNA, herein designated VGAM RNA, to host target binding sites on VGAM147 host target RNA, herein designated VGAM HOST TARGET RNA, such as BINDING SITE I, BINDING SITE II and BINDING SITE III, inhibits translation of VGAM147 host target RNA, herein designated VGAM HOST TARGET RNA, into VGAM147 host target protein, herein designated VGAM HOST TARGET PROTEIN. VGAM host target protein is therefore outlined by a broken line.

[2020] It is appreciated that VGAM147 host target gene, herein designated VGAM HOST TARGET GENE, in fact represents a plurality of VGAM147 host target genes. The mRNA of each one of this plurality of VGAM147 host target genes comprises one or more host target binding sites, each having a nucleotide sequence which is at least partly complementary to VGAM147 RNA, herein designated VGAM RNA, and which when bound by VGAM147 RNA, herein designated VGAM RNA, causes inhibition of translation of respective one or more VGAM147 host target proteins.

[2021] It is further appreciated by one skilled in the art that the mode of translational inhibition illustrated by FIG. 1 with specific reference to translational inhibition exerted by VGAM147 gene, herein designated VGAM GENE, on one or more VGAM147 host target gene, herein designated VGAM HOST TARGET GENE, is in fact common to other known non-viral miRNA genes. As mentioned hereinabove with reference to the background section, although a specific complementary binding site has been demonstrated only for some of the known miRNA genes (primarily Lin-4 and Let-7), all other recently discovered miRNA genes are also believed by those skilled in the art to modulate expression of other genes by complementary binding, although specific complementary binding sites of these other miRNA genes have not yet been found (Ruvkun G., Perspective: Glimpses of a tiny RNA world, Science 294, 779 (2001)).

[2022] It is yet further appreciated that a function of VGAM147 is inhibition of expression of host target genes, as part of a novel viral mechanism of attacking a host. Accordingly, utilities of VGAM147 include diagnosis, prevention and treatment of viral infection by Vaccinia virus. Specific functions, and accordingly utilities, of VGAM147 correlate with, and may be deduced from, the identity of the host target genes which VGAM147 binds and inhibits, and the function of these host target genes, as elaborated hereinbelow.

[2023] Nucleotide sequences of the VGAM147 precursor RNA, herein designated VGAM PRECURSOR RNA, and of the diced VGAM147 RNA, herein designated VGAM RNA, and a schematic representation of the secondary folding of VGAM147 folded precursor RNA, herein designated VGAM FOLDED PRECURSOR RNA, of VGAM147 are further described hereinbelow with reference to Table 1.

[2024] Nucleotide sequences of host target binding sites, such as BINDING SITE-I, BINDING SITE-II and BINDING SITE-III of FIG. 1, found on, and schematic representation of the complementarity of each of these host target binding sites to VGAM147 RNA, herein designated VGAM RNA, are described hereinbelow with reference to Table 2.

[2025] FIG. 1 further provides a conceptual description of another novel bioinformatically detected viral gene of the present invention, referred to here as Viral Genomic Address Messenger 148 (VGAM148) viral gene, which modulates expression of respective host target genes thereof, the function and utility of which host target genes is known in the art.

[2026] VGAM148 is a novel bioinformatically detected regulatory, non protein coding, viral micro RNA (miRNA) gene. The method by which VGAM148 was detected is described hereinabove with reference to FIGS. 2-8.

[2027] VGAM148 gene, herein designated VGAM GENE, is a viral gene contained in the genome of Vaccinia virus. VGAM148 host target gene, herein designated VGAM HOST TARGET GENE, is a human gene contained in the human genome.

[2028] VGAM148 gene, herein designated VGAM GENE, encodes a VGAM148 precursor RNA, herein designated VGAM PRECURSOR RNA. Similar to other miRNA genes, and unlike most ordinary genes, VGAM148 precursor RNA, herein designated VGAM PRECURSOR RNA, does not encode a protein. A nucleotide sequence identical or highly similar to the nucleotide sequence of VGAM148 precursor RNA is designated SEQ ID:134, and is provided hereinbelow with reference to the sequence listing part. Nucleotide sequence SEQ ID:134 is located at position 72012 relative to the genome of Vaccinia virus.

[2029] VGAM148 precursor RNA, herein designated VGAM PRECURSOR RNA, folds onto itself, forming VGAM148 folded precursor RNA, herein designated VGAM FOLDED PRECURSOR RNA, which has a two-dimensional hairpin structure. As is well known in the art, this hairpin structure, is typical of RNA encoded by miRNA genes, and is due to the fact that the nucleotide sequence of the first half of the RNA encoded by a miRNA gene is an accurate or partial inversed-reversed sequence of the nucleotide sequence of the second half thereof.

[2030] An enzyme complex designated DICER COMPLEX, dices the VGAM148 folded precursor RNA, herein designated VGAM FOLDED PRECURSOR RNA, into VGAM148 RNA, herein designated VGAM RNA, a single stranded ˜22 nt long RNA segment. As is known in the art, dicing of a hairpin structured RNA precursor product into a short ˜22 nt RNA segment is catalyzed by an enzyme complex comprising an enzyme called Dicer together with other necessary proteins. A probable (over 91%) nucleotide sequence of VGAM148 RNA is designated SEQ ID:483, and is provided hereinbelow with reference to the sequence listing part.

[2031] VGAM148 host target gene, herein designated VGAM HOST TARGET GENE, encodes a corresponding messenger RNA, VGAM148 host target RNA, herein designated VGAM HOST TARGET RNA. VGAM148 host target RNA, herein designated VGAM HOST TARGET RNA, comprises three regions, as is typical of mRNA of a protein coding gene: a 5 untranslated region, a protein coding region and a 3 untranslated region, designated 5UTR, PROTEIN CODING and 3UTR respectively.

[2032] VGAM148 RNA, herein designated VGAM RNA, binds complementarily to one or more host target binding sites located in untranslated regions of VGAM148 host target RNA, herein designated VGAM HOST TARGET RNA. This complementary binding is due to the fact that the nucleotide sequence of VGAM148 RNA, herein designated VGAM RNA, is an accurate or a partial inversed-reversed sequence of the nucleotide sequence of each of the host target binding sites. As an illustration, FIG. 1 shows 3 such host target binding sites, designated BINDING SITE I, BINDING SITE II and BINDING SITE III respectively. It is appreciated that the number of host target binding sites shown in FIG. 1 is meant as an illustration only, and is not meant to be limiting VGAM148 RNA, herein designated VGAM RNA, may have a different number of host target binding sites in untranslated regions of a VGAM148 host target RNA, herein designated VGAM HOST TARGET RNA. It is further appreciated that while FIG. 1 depicts host target binding sites in the 3UTR region, this is meant as an example only these host target binding sites may be located in the 3UTR region, the 5UTR region, or in both 3UTR and 5UTR regions.

[2033] The complementary binding of VGAM148 RNA, herein designated VGAM RNA, to host target binding sites on VGAM148 host target RNA, herein designated VGAM HOST TARGET RNA, such as BINDING SITE I, BINDING SITE II and BINDING SITE III, inhibits translation of VGAM148 host target RNA, herein designated VGAM HOST TARGET RNA, into VGAM148 host target protein, herein designated VGAM HOST TARGET PROTEIN. VGAM host target protein is therefore outlined by a broken line.

[2034] It is appreciated that VGAM148 host target gene, herein designated VGAM HOST TARGET GENE, in fact represents a plurality of VGAM148 host target genes. The mRNA of each one of this plurality of VGAM148 host target genes comprises one or more host target binding sites, each having a nucleotide sequence which is at least partly complementary to VGAM148 RNA, herein designated VGAM RNA, and which when bound by VGAM148 RNA, herein designated VGAM RNA, causes inhibition of translation of respective one or more VGAM148 host target proteins.

[2035] It is further appreciated by one skilled in the art that the mode of translational inhibition illustrated by FIG. 1 with specific reference to translational inhibition exerted by VGAM148 gene, herein designated VGAM GENE, on one or more VGAM148 host target gene, herein designated VGAM HOST TARGET GENE, is in fact common to other known non-viral miRNA genes. As mentioned hereinabove with reference to the background section, although a specific complementary binding site has been demonstrated only for some of the known miRNA genes (primarily Lin-4 and Let-7), all other recently discovered miRNA genes are also believed by those skilled in the art to modulate expression of other genes by complementary binding, although specific complementary binding sites of these other miRNA genes have not yet been found (Ruvkun G., Perspective: Glimpses of a tiny RNA world, Science 294, 779 (2001)).

[2036] It is yet further appreciated that a function of VGAM148 is inhibition of expression of host target genes, as part of a novel viral mechanism of attacking a host. Accordingly, utilities of VGAM148 include diagnosis, prevention and treatment of viral infection by Vaccinia virus. Specific functions, and accordingly utilities, of VGAM148 correlate with, and may be deduced from, the identity of the host target genes which VGAM148 binds and inhibits, and the function of these host target genes, as elaborated hereinbelow.

[2037] Nucleotide sequences of the VGAM148 precursor RNA, herein designated VGAM PRECURSOR RNA, and of the diced VGAM148 RNA, herein designated VGAM RNA, and a schematic representation of the secondary folding of VGAM148 folded precursor RNA, herein designated VGAM FOLDED PRECURSOR RNA, of VGAM148 are further described hereinbelow with reference to Table 1.

[2038] Nucleotide sequences of host target binding sites, such as BINDING SITE-I, BINDING SITE-II and BINDING SITE-III of FIG. 1, found on, and schematic representation of the complementarity of each of these host target binding sites to VGAM148 RNA, herein designated VGAM RNA, are described hereinbelow with reference to Table 2.

[2039] FIG. 1 further provides a conceptual description of another novel bioinformatically detected viral gene of the present invention, referred to here as Viral Genomic Address Messenger 149 (VGAM149) viral gene, which modulates expression of respective host target genes thereof, the function and utility of which host target genes is known in the art.

[2040] VGAM149 is a novel bioinformatically detected regulatory, non protein coding, viral micro RNA (miRNA) gene. The method by which VGAM149 was detected is described hereinabove with reference to FIGS. 2-8.

[2041] VGAM149 gene, herein designated VGAM GENE, is a viral gene contained in the genome of Vaccinia virus. VGAM149 host target gene, herein designated VGAM HOST TARGET GENE, is a human gene contained in the human genome.

[2042] VGAM149 gene, herein designated VGAM GENE, encodes a VGAM149 precursor RNA, herein designated VGAM PRECURSOR RNA. Similar to other miRNA genes, and unlike most ordinary genes, VGAM149 precursor RNA, herein designated VGAM PRECURSOR RNA, does not encode a protein. A nucleotide sequence identical or highly similar to the nucleotide sequence of VGAM149 precursor RNA is designated SEQ ID:135, and is provided hereinbelow with reference to the sequence listing part. Nucleotide sequence SEQ ID:135 is located at position 71497 relative to the genome of Vaccinia virus.

[2043] VGAM149 precursor RNA, herein designated VGAM PRECURSOR RNA, folds onto itself, forming VGAM149 folded precursor RNA, herein designated VGAM FOLDED PRECURSOR RNA, which has a two-dimensional hairpin structure. As is well known in the art, this hairpin structure, is typical of RNA encoded by miRNA genes, and is due to the fact that the nucleotide sequence of the first half of the RNA encoded by a miRNA gene is an accurate or partial inversed-reversed sequence of the nucleotide sequence of the second half thereof.

[2044] An enzyme complex designated DICER COMPLEX, dices the VGAM149 folded precursor RNA, herein designated VGAM FOLDED PRECURSOR RNA, into VGAM149 RNA, herein designated VGAM RNA, a single stranded ˜22 nt long RNA segment. As is known in the art, dicing of a hairpin structured RNA precursor product into a short ˜22 nt RNA segment is catalyzed by an enzyme complex comprising an enzyme called Dicer together with other necessary proteins. A probable (over 71%) nucleotide sequence of VGAM149 RNA is designated SEQ ID:484, and is provided hereinbelow with reference to the sequence listing part.

[2045] VGAM149 host target gene, herein designated VGAM HOST TARGET GENE, encodes a corresponding messenger RNA, VGAM149 host target RNA, herein designated VGAM HOST TARGET RNA. VGAM149 host target RNA, herein designated VGAM HOST TARGET RNA, comprises three regions, as is typical of mRNA of a protein coding gene: a 5 untranslated region, a protein coding region and a 3 untranslated region, designated 5UTR, PROTEIN CODING and 3UTR respectively.

[2046] VGAM149 RNA, herein designated VGAM RNA, binds complementarily to one or more host target binding sites located in untranslated regions of VGAM149 host target RNA, herein designated VGAM HOST TARGET RNA. This complementary binding is due to the fact that the nucleotide sequence of VGAM149 RNA, herein designated VGAM RNA, is an accurate or a partial inversed-reversed sequence of the nucleotide sequence of each of the host target binding sites. As an illustration, FIG. 1 shows 3 such host target binding sites, designated BINDING SITE I, BINDING SITE II and BINDING SITE III respectively. It is appreciated that the number of host target binding sites shown in FIG. 1 is meant as an illustration only, and is not meant to be limiting VGAM149 RNA, herein designated VGAM RNA, may have a different number of host target binding sites in untranslated regions of a VGAM149 host target RNA, herein designated VGAM HOST TARGET RNA. It is further appreciated that while FIG. 1 depicts host target binding sites in the 3UTR region, this is meant as an example only these host target binding sites may be located in the 3UTR region, the 5UTR region, or in both 3UTR and 5UTR regions.

[2047] The complementary binding of VGAM149 RNA, herein designated VGAM RNA, to host target binding sites on VGAM149 host target RNA, herein designated VGAM HOST TARGET RNA, such as BINDING SITE I, BINDING SITE II and BINDING SITE III, inhibits translation of VGAM149 host target RNA, herein designated VGAM HOST TARGET RNA, into VGAM149 host target protein, herein designated VGAM HOST TARGET PROTEIN. VGAM host target protein is therefore outlined by a broken line.

[2048] It is appreciated that VGAM149 host target gene, herein designated VGAM HOST TARGET GENE, in fact represents a plurality of VGAM149 host target genes. The mRNA of each one of this plurality of VGAM149 host target genes comprises one or more host target binding sites, each having a nucleotide sequence which is at least partly complementary to VGAM149 RNA, herein designated VGAM RNA, and which when bound by VGAM149 RNA, herein designated VGAM RNA, causes inhibition of translation of respective one or more VGAM149 host target proteins.

[2049] It is further appreciated by one skilled in the art that the mode of translational inhibition illustrated by FIG. 1 with specific reference to translational inhibition exerted by VGAM149 gene, herein designated VGAM GENE, on one or more VGAM149 host target gene, herein designated VGAM HOST TARGET GENE, is in fact common to other known non-viral miRNA genes. As mentioned hereinabove with reference to the background section, although a specific complementary binding site has been demonstrated only for some of the known miRNA genes (primarily Lin-4 and Let-7), all other recently discovered miRNA genes are also believed by those skilled in the art to modulate expression of other genes by complementary binding, although specific complementary binding sites of these other miRNA genes have not yet been found (Ruvkun G., Perspective: Glimpses of a tiny RNA world, Science 294, 779 (2001)).

[2050] It is yet further appreciated that a function of VGAM149 is inhibition of expression of host target genes, as part of a novel viral mechanism of attacking a host. Accordingly, utilities of VGAM149 include diagnosis, prevention and treatment of viral infection by Vaccinia virus. Specific functions, and accordingly utilities, of VGAM149 correlate with, and may be deduced from, the identity of the host target genes which VGAM149 binds and inhibits, and the function of these host target genes, as elaborated hereinbelow.

[2051] Nucleotide sequences of the VGAM149 precursor RNA, herein designated VGAM PRECURSOR RNA, and of the diced VGAM149 RNA, herein designated VGAM RNA, and a schematic representation of the secondary folding of VGAM149 folded precursor RNA, herein designated VGAM FOLDED PRECURSOR RNA, of VGAM149 are further described hereinbelow with reference to Table 1.

[2052] Nucleotide sequences of host target binding sites, such as BINDING SITE-I, BINDING SITE-II and BINDING SITE-III of FIG. 1, found on, and schematic representation of the complementarity of each of these host target binding sites to VGAM149 RNA, herein designated VGAM RNA, are described hereinbelow with reference to Table 2.

[2053] FIG. 1 further provides a conceptual description of another novel bioinformatically detected viral gene of the present invention, referred to here as Viral Genomic Address Messenger 150 (VGAM150) viral gene, which modulates expression of respective host target genes thereof, the function and utility of which host target genes is known in the art.

[2054] VGAM150 is a novel bioinformatically detected regulatory, non protein coding, viral micro RNA (miRNA) gene. The method by which VGAM150 was detected is described hereinabove with reference to FIGS. 2-8.

[2055] VGAM150 gene, herein designated VGAM GENE, is a viral gene contained in the genome of Vaccinia virus. VGAM150 host target gene, herein designated VGAM HOST TARGET GENE, is a human gene contained in the human genome.

[2056] VGAM150 gene, herein designated VGAM GENE, encodes a VGAM150 precursor RNA, herein designated VGAM PRECURSOR RNA. Similar to other miRNA genes, and unlike most ordinary genes, VGAM150 precursor RNA, herein designated VGAM PRECURSOR RNA, does not encode a protein. A nucleotide sequence identical or highly similar to the nucleotide sequence of VGAM150 precursor RNA is designated SEQ ID:136, and is provided hereinbelow with reference to the sequence listing part. Nucleotide sequence SEQ ID:136 is located at position 73985 relative to the genome of Vaccinia virus.

[2057] VGAM150 precursor RNA, herein designated VGAM PRECURSOR RNA, folds onto itself, forming VGAM150 folded precursor RNA, herein designated VGAM FOLDED PRECURSOR RNA, which has a two-dimensional hairpin structure. As is well known in the art, this hairpin structure, is typical of RNA encoded by miRNA genes, and is due to the fact that the nucleotide sequence of the first half of the RNA encoded by a miRNA gene is an accurate or partial inversed-reversed sequence of the nucleotide sequence of the second half thereof.

[2058] An enzyme complex designated DICER COMPLEX, dices the VGAM150 folded precursor RNA, herein designated VGAM FOLDED PRECURSOR RNA, into VGAM150 RNA, herein designated VGAM RNA, a single stranded ˜22 nt long RNA segment. As is known in the art, dicing of a hairpin structured RNA precursor product into a short ˜22 nt RNA segment is catalyzed by an enzyme complex comprising an enzyme called Dicer together with other necessary proteins. A probable (over 93%) nucleotide sequence of VGAM150 RNA is designated SEQ ID:485, and is provided hereinbelow with reference to the sequence listing part.

[2059] VGAM150 host target gene, herein designated VGAM HOST TARGET GENE, encodes a corresponding messenger RNA, VGAM150 host target RNA, herein designated VGAM HOST TARGET RNA. VGAM150 host target RNA, herein designated VGAM HOST TARGET RNA, comprises three regions, as is typical of mRNA of a protein coding gene: a 5 untranslated region, a protein coding region and a 3 untranslated region, designated 5UTR, PROTEIN CODING and 3UTR respectively.

[2060] VGAM150 RNA, herein designated VGAM RNA, binds complementarily to one or more host target binding sites located in untranslated regions of VGAM150 host target RNA, herein designated VGAM HOST TARGET RNA. This complementary binding is due to the fact that the nucleotide sequence of VGAM150 RNA, herein designated VGAM RNA, is an accurate or a partial inversed-reversed sequence of the nucleotide sequence of each of the host target binding sites. As an illustration, FIG. 1 shows 3 such host target binding sites, designated BINDING SITE I, BINDING SITE II and BINDING SITE III respectively. It is appreciated that the number of host target binding sites shown in FIG. 1 is meant as an illustration only, and is not meant to be limiting VGAM150 RNA, herein designated VGAM RNA, may have a different number of host target binding sites in untranslated regions of a VGAM150 host target RNA, herein designated VGAM HOST TARGET RNA. It is further appreciated that while FIG. 1 depicts host target binding sites in the 3UTR region, this is meant as an example only these host target binding sites may be located in the 3UTR region, the 5UTR region, or in both 3UTR and 5UTR regions.

[2061] The complementary binding of VGAM150 RNA, herein designated VGAM RNA, to host target binding sites on VGAM150 host target RNA, herein designated VGAM HOST TARGET RNA, such as BINDING SITE I, BINDING SITE II and BINDING SITE III, inhibits translation of VGAM150 host target RNA, herein designated VGAM HOST TARGET RNA, into VGAM150 host target protein, herein designated VGAM HOST TARGET PROTEIN. VGAM host target protein is therefore outlined by a broken line.

[2062] It is appreciated that VGAM150 host target gene, herein designated VGAM HOST TARGET GENE, in fact represents a plurality of VGAM150 host target genes. The mRNA of each one of this plurality of VGAM150 host target genes comprises one or more host target binding sites, each having a nucleotide sequence which is at least partly complementary to VGAM150 RNA, herein designated VGAM RNA, and which when bound by VGAM150 RNA, herein designated VGAM RNA, causes inhibition of translation of respective one or more VGAM150 host target proteins.

[2063] It is further appreciated by one skilled in the art that the mode of translational inhibition illustrated by FIG. 1 with specific reference to translational inhibition exerted by VGAM150 gene, herein designated VGAM GENE, on one or more VGAM150 host target gene, herein designated VGAM HOST TARGET GENE, is in fact common to other known non-viral miRNA genes. As mentioned hereinabove with reference to the background section, although a specific complementary binding site has been demonstrated only for some of the known miRNA genes (primarily Lin-4 and Let-7), all other recently discovered miRNA genes are also believed by those skilled in the art to modulate expression of other genes by complementary binding, although specific complementary binding sites of these other miRNA genes have not yet been found (Ruvkun G., Perspective: Glimpses of a tiny RNA world, Science 294, 779 (2001)).

[2064] It is yet further appreciated that a function of VGAM150 is inhibition of expression of host target genes, as part of a novel viral mechanism of attacking a host. Accordingly, utilities of VGAM150 include diagnosis, prevention and treatment of viral infection by Vaccinia virus. Specific functions, and accordingly utilities, of VGAM150 correlate with, and may be deduced from, the identity of the host target genes which VGAM150 binds and inhibits, and the function of these host target genes, as elaborated hereinbelow.

[2065] Nucleotide sequences of the VGAM150 precursor RNA, herein designated VGAM PRECURSOR RNA, and of the diced VGAM150 RNA, herein designated VGAM RNA, and a schematic representation of the secondary folding of VGAM150 folded precursor RNA, herein designated VGAM FOLDED PRECURSOR RNA, of VGAM150 are further described hereinbelow with reference to Table 1.

[2066] Nucleotide sequences of host target binding sites, such as BINDING SITE-I, BINDING SITE-II and BINDING SITE-III of FIG. 1, found on, and schematic representation of the complementarity of each of these host target binding sites to VGAM150 RNA, herein designated VGAM RNA, are described hereinbelow with reference to Table 2.

[2067] FIG. 1 further provides a conceptual description of another novel bioinformatically detected viral gene of the present invention, referred to here as Viral Genomic Address Messenger 151 (VGAM151) viral gene, which modulates expression of respective host target genes thereof, the function and utility of which host target genes is known in the art.

[2068] VGAM151 is a novel bioinformatically detected regulatory, non protein coding, viral micro RNA (miRNA) gene. The method by which VGAM151 was detected is described hereinabove with reference to FIGS. 2-8.

[2069] VGAM151 gene, herein designated VGAM GENE, is a viral gene contained in the genome of Vaccinia virus. VGAM151 host target gene, herein designated VGAM HOST TARGET GENE, is a human gene contained in the human genome.

[2070] VGAM151 gene, herein designated VGAM GENE, encodes a VGAM151 precursor RNA, herein designated VGAM PRECURSOR RNA. Similar to other miRNA genes, and unlike most ordinary genes, VGAM151 precursor RNA, herein designated VGAM PRECURSOR RNA, does not encode a protein. A nucleotide sequence identical or highly similar to the nucleotide sequence of VGAM151 precursor RNA is designated SEQ ID:137, and is provided hereinbelow with reference to the sequence listing part. Nucleotide sequence SEQ ID:137 is located at position 72599 relative to the genome of Vaccinia virus.

[2071] VGAM151 precursor RNA, herein designated VGAM PRECURSOR RNA, folds onto itself, forming VGAM151 folded precursor RNA, herein designated VGAM FOLDED PRECURSOR RNA, which has a two-dimensional hairpin structure. As is well known in the art, this hairpin structure, is typical of RNA encoded by miRNA genes, and is due to the fact that the nucleotide sequence of the first half of the RNA encoded by a miRNA gene is an accurate or partial inversed-reversed sequence of the nucleotide sequence of the second half thereof.

[2072] An enzyme complex designated DICER COMPLEX, dices the VGAM151 folded precursor RNA, herein designated VGAM FOLDED PRECURSOR RNA, into VGAM151 RNA, herein designated VGAM RNA, a single stranded ˜22 nt long RNA segment. As is known in the art, dicing of a hairpin structured RNA precursor product into a short ˜22 nt RNA segment is catalyzed by an enzyme complex comprising an enzyme called Dicer together with other necessary proteins. A probable (over 89%) nucleotide sequence of VGAM151 RNA is designated SEQ ID:486, and is provided hereinbelow with reference to the sequence listing part.

[2073] VGAM151 host target gene, herein designated VGAM HOST TARGET GENE, encodes a corresponding messenger RNA, VGAM151 host target RNA, herein designated VGAM HOST TARGET RNA. VGAM151 host target RNA, herein designated VGAM HOST TARGET RNA, comprises three regions, as is typical of mRNA of a protein coding gene: a 5 untranslated region, a protein coding region and a 3 untranslated region, designated 5UTR, PROTEIN CODING and 3UTR respectively.

[2074] VGAM151 RNA, herein designated VGAM RNA, binds complementarily to one or more host target binding sites located in untranslated regions of VGAM151 host target RNA, herein designated VGAM HOST TARGET RNA. This complementary binding is due to the fact that the nucleotide sequence of VGAM151 RNA, herein designated VGAM RNA, is an accurate or a partial inversed-reversed sequence of the nucleotide sequence of each of the host target binding sites. As an illustration, FIG. 1 shows 3 such host target binding sites, designated BINDING SITE I, BINDING SITE II and BINDING SITE III respectively. It is appreciated that the number of host target binding sites shown in FIG. 1 is meant as an illustration only, and is not meant to be limiting VGAM151 RNA, herein designated VGAM RNA, may have a different number of host target binding sites in untranslated regions of a VGAM151 host target RNA, herein designated VGAM HOST TARGET RNA. It is further appreciated that while FIG. 1 depicts host target binding sites in the 3UTR region, this is meant as an example only these host target binding sites may be located in the 3UTR region, the 5UTR region, or in both 3UTR and 5UTR regions.

[2075] The complementary binding of VGAM151 RNA, herein designated VGAM RNA, to host target binding sites on VGAM151 host target RNA, herein designated VGAM HOST TARGET RNA, such as BINDING SITE I, BINDING SITE II and BINDING SITE III, inhibits translation of VGAM151 host target RNA, herein designated VGAM HOST TARGET RNA, into VGAM151 host target protein, herein designated VGAM HOST TARGET PROTEIN. VGAM host target protein is therefore outlined by a broken line.

[2076] It is appreciated that VGAM151 host target gene, herein designated VGAM HOST TARGET GENE, in fact represents a plurality of VGAM151 host target genes. The mRNA of each one of this plurality of VGAM151 host target genes comprises one or more host target binding sites, each having a nucleotide sequence which is at least partly complementary to VGAM151 RNA, herein designated VGAM RNA, and which when bound by VGAM151 RNA, herein designated VGAM RNA, causes inhibition of translation of respective one or more VGAM151 host target proteins.

[2077] It is further appreciated by one skilled in the art that the mode of translational inhibition illustrated by FIG. 1 with specific reference to translational inhibition exerted by VGAM151 gene, herein designated VGAM GENE, on one or more VGAM151 host target gene, herein designated VGAM HOST TARGET GENE, is in fact common to other known non-viral miRNA genes. As mentioned hereinabove with reference to the background section, although a specific complementary binding site has been demonstrated only for some of the known miRNA genes (primarily Lin-4 and Let-7), all other recently discovered miRNA genes are also believed by those skilled in the art to modulate expression of other genes by complementary binding, although specific complementary binding sites of these other miRNA genes have not yet been found (Ruvkun G., Perspective: Glimpses of a tiny RNA world, Science 294, 779 (2001)).

[2078] It is yet further appreciated that a function of VGAM151 is inhibition of expression of host target genes, as part of a novel viral mechanism of attacking a host. Accordingly, utilities of VGAM151 include diagnosis, prevention and treatment of viral infection by Vaccinia virus. Specific functions, and accordingly utilities, of VGAM151 correlate with, and may be deduced from, the identity of the host target genes which VGAM151 binds and inhibits, and the function of these host target genes, as elaborated hereinbelow.

[2079] Nucleotide sequences of the VGAM151 precursor RNA, herein designated VGAM PRECURSOR RNA, and of the diced VGAM151 RNA, herein designated VGAM RNA, and a schematic representation of the secondary folding of VGAM151 folded precursor RNA, herein designated VGAM FOLDED PRECURSOR RNA, of VGAM151 are further described hereinbelow with reference to Table 1.

[2080] Nucleotide sequences of host target binding sites, such as BINDING SITE-I, BINDING SITE-II and BINDING SITE-III of FIG. 1, found on, and schematic representation of the complementarity of each of these host target binding sites to VGAM151 RNA, herein designated VGAM RNA, are described hereinbelow with reference to Table 2.

[2081] FIG. 1 further provides a conceptual description of another novel bioinformatically detected viral gene of the present invention, referred to here as Viral Genomic Address Messenger 152 (VGAM152) viral gene, which modulates expression of respective host target genes thereof, the function and utility of which host target genes is known in the art.

[2082] VGAM152 is a novel bioinformatically detected regulatory, non protein coding, viral micro RNA (miRNA) gene. The method by which VGAM152 was detected is described hereinabove with reference to FIGS. 2-8.

[2083] VGAM152 gene, herein designated VGAM GENE, is a viral gene contained in the genome of Vaccinia virus. VGAM152 host target gene, herein designated VGAM HOST TARGET GENE, is a human gene contained in the human genome.

[2084] VGAM152 gene, herein designated VGAM GENE, encodes a VGAM152 precursor RNA, herein designated VGAM PRECURSOR RNA. Similar to other miRNA genes, and unlike most ordinary genes, VGAM152 precursor RNA, herein designated VGAM PRECURSOR RNA, does not encode a protein. A nucleotide sequence identical or highly similar to the nucleotide sequence of VGAM152 precursor RNA is designated SEQ ID:138, and is provided hereinbelow with reference to the sequence listing part. Nucleotide sequence SEQ ID:138 is located at position 74425 relative to the genome of Vaccinia virus.

[2085] VGAM152 precursor RNA, herein designated VGAM PRECURSOR RNA, folds onto itself, forming VGAM152 folded precursor RNA, herein designated VGAM FOLDED PRECURSOR RNA, which has a two-dimensional hairpin structure. As is well known in the art, this hairpin structure, is typical of RNA encoded by miRNA genes, and is due to the fact that the nucleotide sequence of the first half of the RNA encoded by a miRNA gene is an accurate or partial inversed-reversed sequence of the nucleotide sequence of the second half thereof.

[2086] An enzyme complex designated DICER COMPLEX, dices the VGAM152 folded precursor RNA, herein designated VGAM FOLDED PRECURSOR RNA, into VGAM152 RNA, herein designated VGAM RNA, a single stranded ˜22 nt long RNA segment. As is known in the art, dicing of a hairpin structured RNA precursor product into a short ˜22 nt RNA segment is catalyzed by an enzyme complex comprising an enzyme called Dicer together with other necessary proteins. A probable (over 73%) nucleotide sequence of VGAM152 RNA is designated SEQ ID:487, and is provided hereinbelow with reference to the sequence listing part.

[2087] VGAM152 host target gene, herein designated VGAM HOST TARGET GENE, encodes a corresponding messenger RNA, VGAM152 host target RNA, herein designated VGAM HOST TARGET RNA. VGAM152 host target RNA, herein designated VGAM HOST TARGET RNA, comprises three regions, as is typical of mRNA of a protein coding gene: a 5 untranslated region, a protein coding region and a 3 untranslated region, designated 5UTR, PROTEIN CODING and 3UTR respectively.

[2088] VGAM152 RNA, herein designated VGAM RNA, binds complementarily to one or more host target binding sites located in untranslated regions of VGAM152 host target RNA, herein designated VGAM HOST TARGET RNA. This complementary binding is due to the fact that the nucleotide sequence of VGAM152 RNA, herein designated VGAM RNA, is an accurate or a partial inversed-reversed sequence of the nucleotide sequence of each of the host target binding sites. As an illustration, FIG. 1 shows 3 such host target binding sites, designated BINDING SITE I, BINDING SITE II and BINDING SITE III respectively. It is appreciated that the number of host target binding sites shown in FIG. 1 is meant as an illustration only, and is not meant to be limiting VGAM152 RNA, herein designated VGAM RNA, may have a different number of host target binding sites in untranslated regions of a VGAM152 host target RNA, herein designated VGAM HOST TARGET RNA. It is further appreciated that while FIG. 1 depicts host target binding sites in the 3UTR region, this is meant as an example only these host target binding sites may be located in the 3UTR region, the 5UTR region, or in both 3UTR and 5UTR regions.

[2089] The complementary binding of VGAM152 RNA, herein designated VGAM RNA, to host target binding sites on VGAM152 host target RNA, herein designated VGAM HOST TARGET RNA, such as BINDING SITE I, BINDING SITE II and BINDING SITE III, inhibits translation of VGAM152 host target RNA, herein designated VGAM HOST TARGET RNA, into VGAM152 host target protein, herein designated VGAM HOST TARGET PROTEIN. VGAM host target protein is therefore outlined by a broken line.

[2090] It is appreciated that VGAM152 host target gene, herein designated VGAM HOST TARGET GENE, in fact represents a plurality of VGAM152 host target genes. The mRNA of each one of this plurality of VGAM152 host target genes comprises one or more host target binding sites, each having a nucleotide sequence which is at least partly complementary to VGAM152 RNA, herein designated VGAM RNA, and which when bound by VGAM152 RNA, herein designated VGAM RNA, causes inhibition of translation of respective one or more VGAM152 host target proteins.

[2091] It is further appreciated by one skilled in the art that the mode of translational inhibition illustrated by FIG. 1 with specific reference to translational inhibition exerted by VGAM152 gene, herein designated VGAM GENE, on one or more VGAM152 host target gene, herein designated VGAM HOST TARGET GENE, is in fact common to other known non-viral miRNA genes. As mentioned hereinabove with reference to the background section, although a specific complementary binding site has been demonstrated only for some of the known miRNA genes (primarily Lin-4 and Let-7), all other recently discovered miRNA genes are also believed by those skilled in the art to modulate expression of other genes by complementary binding, although specific complementary binding sites of these other miRNA genes have not yet been found (Ruvkun G., Perspective: Glimpses of a tiny RNA world, Science 294, 779 (2001)).

[2092] It is yet further appreciated that a function of VGAM152 is inhibition of expression of host target genes, as part of a novel viral mechanism of attacking a host. Accordingly, utilities of VGAM152 include diagnosis, prevention and treatment of viral infection by Vaccinia virus. Specific functions, and accordingly utilities, of VGAM152 correlate with, and may be deduced from, the identity of the host target genes which VGAM152 binds and inhibits, and the function of these host target genes, as elaborated hereinbelow.

[2093] Nucleotide sequences of the VGAM152 precursor RNA, herein designated VGAM PRECURSOR RNA, and of the diced VGAM152 RNA, herein designated VGAM RNA, and a schematic representation of the secondary folding of VGAM152 folded precursor RNA, herein designated VGAM FOLDED PRECURSOR RNA, of VGAM152 are further described hereinbelow with reference to Table 1.

[2094] Nucleotide sequences of host target binding sites, such as BINDING SITE-I, BINDING SITE-II and BINDING SITE-III of FIG. 1, found on, and schematic representation of the complementarity of each of these host target binding sites to VGAM152 RNA, herein designated VGAM RNA, are described hereinbelow with reference to Table 2.

[2095] FIG. 1 further provides a conceptual description of another novel bioinformatically detected viral gene of the present invention, referred to here as Viral Genomic Address Messenger 153 (VGAM153) viral gene, which modulates expression of respective host target genes thereof, the function and utility of which host target genes is known in the art.

[2096] VGAM153 is a novel bioinformatically detected regulatory, non protein coding, viral micro RNA (miRNA) gene. The method by which VGAM153 was detected is described hereinabove with reference to FIGS. 2-8.

[2097] VGAM153 gene, herein designated VGAM GENE, is a viral gene contained in the genome of Vaccinia virus. VGAM153 host target gene, herein designated VGAM HOST TARGET GENE, is a human gene contained in the human genome.

[2098] VGAM153 gene, herein designated VGAM GENE, encodes a VGAM153 precursor RNA, herein designated VGAM PRECURSOR RNA. Similar to other miRNA genes, and unlike most ordinary genes, VGAM153 precursor RNA, herein designated VGAM PRECURSOR RNA, does not encode a protein. A nucleotide sequence identical or highly similar to the nucleotide sequence of VGAM153 precursor RNA is designated SEQ ID:139, and is provided hereinbelow with reference to the sequence listing part. Nucleotide sequence SEQ ID:139 is located at position 74889 relative to the genome of Vaccinia virus.

[2099] VGAM153 precursor RNA, herein designated VGAM PRECURSOR RNA, folds onto itself, forming VGAM153 folded precursor RNA, herein designated VGAM FOLDED PRECURSOR RNA, which has a two-dimensional hairpin structure. As is well known in the art, this hairpin structure, is typical of RNA encoded by miRNA genes, and is due to the fact that the nucleotide sequence of the first half of the RNA encoded by a miRNA gene is an accurate or partial inversed-reversed sequence of the nucleotide sequence of the second half thereof.

[2100] An enzyme complex designated DICER COMPLEX, dices the VGAM153 folded precursor RNA, herein designated VGAM FOLDED PRECURSOR RNA, into VGAM153 RNA, herein designated VGAM RNA, a single stranded ˜22 nt long RNA segment. As is known in the art, dicing of a hairpin structured RNA precursor product into a short ˜22 nt RNA segment is catalyzed by an enzyme complex comprising an enzyme called Dicer together with other necessary proteins. A probable (over 76%) nucleotide sequence of VGAM153 RNA is designated SEQ ID:488, and is provided hereinbelow with reference to the sequence listing part.

[2101] VGAM153 host target gene, herein designated VGAM HOST TARGET GENE, encodes a corresponding messenger RNA, VGAM153 host target RNA, herein designated VGAM HOST TARGET RNA. VGAM153 host target RNA, herein designated VGAM HOST TARGET RNA, comprises three regions, as is typical of mRNA of a protein coding gene: a 5 untranslated region, a protein coding region and a 3 untranslated region, designated 5UTR, PROTEIN CODING and 3UTR respectively.

[2102] VGAM153 RNA, herein designated VGAM RNA, binds complementarily to one or more host target binding sites located in untranslated regions of VGAM153 host target RNA, herein designated VGAM HOST TARGET RNA. This complementary binding is due to the fact that the nucleotide sequence of VGAM153 RNA, herein designated VGAM RNA, is an accurate or a partial inversed-reversed sequence of the nucleotide sequence of each of the host target binding sites. As an illustration, FIG. 1 shows 3 such host target binding sites, designated BINDING SITE I, BINDING SITE II and BINDING SITE III respectively. It is appreciated that the number of host target binding sites shown in FIG. 1 is meant as an illustration only, and is not meant to be limiting VGAM153 RNA, herein designated VGAM RNA, may have a different number of host target binding sites in untranslated regions of a VGAM153 host target RNA, herein designated VGAM HOST TARGET RNA. It is further appreciated that while FIG. 1 depicts host target binding sites in the 3UTR region, this is meant as an example only these host target binding sites may be located in the 3UTR region, the 5UTR region, or in both 3UTR and 5UTR regions.

[2103] The complementary binding of VGAM153 RNA, herein designated VGAM RNA, to host target binding sites on VGAM153 host target RNA, herein designated VGAM HOST TARGET RNA, such as BINDING SITE I, BINDING SITE II and BINDING SITE III, inhibits translation of VGAM153 host target RNA, herein designated VGAM HOST TARGET RNA, into VGAM153 host target protein, herein designated VGAM HOST TARGET PROTEIN. VGAM host target protein is therefore outlined by a broken line.

[2104] It is appreciated that VGAM153 host target gene, herein designated VGAM HOST TARGET GENE, in fact represents a plurality of VGAM153 host target genes. The mRNA of each one of this plurality of VGAM153 host target genes comprises one or more host target binding sites, each having a nucleotide sequence which is at least partly complementary to VGAM153 RNA, herein designated VGAM RNA, and which when bound by VGAM153 RNA, herein designated VGAM RNA, causes inhibition of translation of respective one or more VGAM153 host target proteins.

[2105] It is further appreciated by one skilled in the art that the mode of translational inhibition illustrated by FIG. 1 with specific reference to translational inhibition exerted by VGAM153 gene, herein designated VGAM GENE, on one or more VGAM153 host target gene, herein designated VGAM HOST TARGET GENE, is in fact common to other known non-viral miRNA genes. As mentioned hereinabove with reference to the background section, although a specific complementary binding site has been demonstrated only for some of the known miRNA genes (primarily Lin-4 and Let-7), all other recently discovered miRNA genes are also believed by those skilled in the art to modulate expression of other genes by complementary binding, although specific complementary binding sites of these other miRNA genes have not yet been found (Ruvkun G., Perspective: Glimpses of a tiny RNA world, Science 294, 779 (2001)).

[2106] It is yet further appreciated that a function of VGAM153 is inhibition of expression of host target genes, as part of a novel viral mechanism of attacking a host. Accordingly, utilities of VGAM153 include diagnosis, prevention and treatment of viral infection by Vaccinia virus. Specific functions, and accordingly utilities, of VGAM153 correlate with, and may be deduced from, the identity of the host target genes which VGAM153 binds and inhibits, and the function of these host target genes, as elaborated hereinbelow.

[2107] Nucleotide sequences of the VGAM153 precursor RNA, herein designated VGAM PRECURSOR RNA, and of the diced VGAM153 RNA, herein designated VGAM RNA, and a schematic representation of the secondary folding of VGAM153 folded precursor RNA, herein designated VGAM FOLDED PRECURSOR RNA, of VGAM153 are further described hereinbelow with reference to Table 1.

[2108] Nucleotide sequences of host target binding sites, such as BINDING SITE-I, BINDING SITE-II and BINDING SITE-III of FIG. 1, found on, and schematic representation of the complementarity of each of these host target binding sites to VGAM153 RNA, herein designated VGAM RNA, are described hereinbelow with reference to Table 2.

[2109] FIG. 1 further provides a conceptual description of another novel bioinformatically detected viral gene of the present invention, referred to here as Viral Genomic Address Messenger 154 (VGAM154) viral gene, which modulates expression of respective host target genes thereof, the function and utility of which host target genes is known in the art.

[2110] VGAM154 is a novel bioinformatically detected regulatory, non protein coding, viral micro RNA (miRNA) gene. The method by which VGAM154 was detected is described hereinabove with reference to FIGS. 2-8.

[2111] VGAM154 gene, herein designated VGAM GENE, is a viral gene contained in the genome of Vaccinia virus. VGAM154 host target gene, herein designated VGAM HOST TARGET GENE, is a human gene contained in the human genome.

[2112] VGAM154 gene, herein designated VGAM GENE, encodes a VGAM154 precursor RNA, herein designated VGAM PRECURSOR RNA. Similar to other miRNA genes, and unlike most ordinary genes, VGAM154 precursor RNA, herein designated VGAM PRECURSOR RNA, does not encode a protein. A nucleotide sequence identical or highly similar to the nucleotide sequence of VGAM154 precursor RNA is designated SEQ ID:140, and is provided hereinbelow with reference to the sequence listing part. Nucleotide sequence SEQ ID: 140 is located at position 80970 relative to the genome of Vaccinia virus.

[2113] VGAM154 precursor RNA, herein designated VGAM PRECURSOR RNA, folds onto itself, forming VGAM154 folded precursor RNA, herein designated VGAM FOLDED PRECURSOR RNA, which has a two-dimensional hairpin structure. As is well known in the art, this hairpin structure, is typical of RNA encoded by miRNA genes, and is due to the fact that the nucleotide sequence of the first half of the RNA encoded by a miRNA gene is an accurate or partial inversed-reversed sequence of the nucleotide sequence of the second half thereof.

[2114] An enzyme complex designated DICER COMPLEX, dices the VGAM154 folded precursor RNA, herein designated VGAM FOLDED PRECURSOR RNA, into VGAM154 RNA, herein designated VGAM RNA, a single stranded ˜22 nt long RNA segment. As is known in the art, dicing of a hairpin structured RNA precursor product into a short ˜22 nt RNA segment is catalyzed by an enzyme complex comprising an enzyme called Dicer together with other necessary proteins. A probable (over 88%) nucleotide sequence of VGAM154 RNA is designated SEQ ID:489, and is provided hereinbelow with reference to the sequence listing part.

[2115] VGAM154 host target gene, herein designated VGAM HOST TARGET GENE, encodes a corresponding messenger RNA, VGAM154 host target RNA, herein designated VGAM HOST TARGET RNA. VGAM154 host target RNA, herein designated VGAM HOST TARGET RNA, comprises three regions, as is typical of mRNA of a protein coding gene: a 5 untranslated region, a protein coding region and a 3 untranslated region, designated 5UTR, PROTEIN CODING and 3UTR respectively.

[2116] VGAM154 RNA, herein designated VGAM RNA, binds complementarily to one or more host target binding sites located in untranslated regions of VGAM154 host target RNA, herein designated VGAM HOST TARGET RNA. This complementary binding is due to the fact that the nucleotide sequence of VGAM154 RNA, herein designated VGAM RNA, is an accurate or a partial inversed-reversed sequence of the nucleotide sequence of each of the host target binding sites. As an illustration, FIG. 1 shows 3 such host target binding sites, designated BINDING SITE I, BINDING SITE II and BINDING SITE III respectively. It is appreciated that the number of host target binding sites shown in FIG. 1 is meant as an illustration only, and is not meant to be limiting VGAM154 RNA, herein designated VGAM RNA, may have a different number of host target binding sites in untranslated regions of a VGAM154 host target RNA, herein designated VGAM HOST TARGET RNA. It is further appreciated that while FIG. 1 depicts host target binding sites in the 3UTR region, this is meant as an example only these host target binding sites may be located in the 3UTR region, the 5UTR region, or in both 3UTR and 5UTR regions.

[2117] The complementary binding of VGAM154 RNA, herein designated VGAM RNA, to host target binding sites on VGAM154 host target RNA, herein designated VGAM HOST TARGET RNA, such as BINDING SITE I, BINDING SITE II and BINDING SITE III, inhibits translation of VGAM154 host target RNA, herein designated VGAM HOST TARGET RNA, into VGAM154 host target protein, herein designated VGAM HOST TARGET PROTEIN. VGAM host target protein is therefore outlined by a broken line.

[2118] It is appreciated that VGAM154 host target gene, herein designated VGAM HOST TARGET GENE, in fact represents a plurality of VGAM154 host target genes. The mRNA of each one of this plurality of VGAM154 host target genes comprises one or more host target binding sites, each having a nucleotide sequence which is at least partly complementary to VGAM154 RNA, herein designated VGAM RNA, and which when bound by VGAM154 RNA, herein designated VGAM RNA, causes inhibition of translation of respective one or more VGAM154 host target proteins.

[2119] It is further appreciated by one skilled in the art that the mode of translational inhibition illustrated by FIG. 1 with specific reference to translational inhibition exerted by VGAM154 gene, herein designated VGAM GENE, on one or more VGAM154 host target gene, herein designated VGAM HOST TARGET GENE, is in fact common to other known non-viral miRNA genes. As mentioned hereinabove with reference to the background section, although a specific complementary binding site has been demonstrated only for some of the known miRNA genes (primarily Lin-4 and Let-7), all other recently discovered miRNA genes are also believed by those skilled in the art to modulate expression of other genes by complementary binding, although specific complementary binding sites of these other miRNA genes have not yet been found (Ruvkun G., Perspective: Glimpses of a tiny RNA world, Science 294, 779 (2001)).

[2120] It is yet further appreciated that a function of VGAM154 is inhibition of expression of host target genes, as part of a novel viral mechanism of attacking a host. Accordingly, utilities of VGAM154 include diagnosis, prevention and treatment of viral infection by Vaccinia virus. Specific functions, and accordingly utilities, of VGAM154 correlate with, and may be deduced from, the identity of the host target genes which VGAM154 binds and inhibits, and the function of these host target genes, as elaborated hereinbelow.

[2121] Nucleotide sequences of the VGAM154 precursor RNA, herein designated VGAM PRECURSOR RNA, and of the diced VGAM154 RNA, herein designated VGAM RNA, and a schematic representation of the secondary folding of VGAM154 folded precursor RNA, herein designated VGAM FOLDED PRECURSOR RNA, of VGAM154 are further described hereinbelow with reference to Table 1.

[2122] Nucleotide sequences of host target binding sites, such as BINDING SITE-I, BINDING SITE-II and BINDING SITE-III of FIG. 1, found on, and schematic representation of the complementarity of each of these host target binding sites to VGAM154 RNA, herein designated VGAM RNA, are described hereinbelow with reference to Table 2.

[2123] FIG. 1 further provides a conceptual description of another novel bioinformatically detected viral gene of the present invention, referred to here as Viral Genomic Address Messenger 155 (VGAM155) viral gene, which modulates expression of respective host target genes thereof, the function and utility of which host target genes is known in the art.

[2124] VGAM155 is a novel bioinformatically detected regulatory, non protein coding, viral micro RNA (miRNA) gene. The method by which VGAM155 was detected is described hereinabove with reference to FIGS. 2-8.

[2125] VGAM155 gene, herein designated VGAM GENE, is a viral gene contained in the genome of Vaccinia virus. VGAM155 host target gene, herein designated VGAM HOST TARGET GENE, is a human gene contained in the human genome.

[2126] VGAM155 gene, herein designated VGAM GENE, encodes a VGAM155 precursor RNA, herein designated VGAM PRECURSOR RNA. Similar to other miRNA genes, and unlike most ordinary genes, VGAM155 precursor RNA, herein designated VGAM PRECURSOR RNA, does not encode a protein. A nucleotide sequence identical or highly similar to the nucleotide sequence of VGAM155 precursor RNA is designated SEQ ID:141, and is provided hereinbelow with reference to the sequence listing part. Nucleotide sequence SEQ ID: 141 is located at position 80298 relative to the genome of Vaccinia virus.

[2127] VGAM155 precursor RNA, herein designated VGAM PRECURSOR RNA, folds onto itself, forming VGAM155 folded precursor RNA, herein designated VGAM FOLDED PRECURSOR RNA, which has a two-dimensional hairpin structure. As is well known in the art, this hairpin structure, is typical of RNA encoded by miRNA genes, and is due to the fact that the nucleotide sequence of the first half of the RNA encoded by a miRNA gene is an accurate or partial inversed-reversed sequence of the nucleotide sequence of the second half thereof.

[2128] An enzyme complex designated DICER COMPLEX, dices the VGAM155 folded precursor RNA, herein designated VGAM FOLDED PRECURSOR RNA, into VGAM155 RNA, herein designated VGAM RNA, a single stranded ˜22 nt long RNA segment. As is known in the art, dicing of a hairpin structured RNA precursor product into a short ˜22 nt RNA segment is catalyzed by an enzyme complex comprising an enzyme called Dicer together with other necessary proteins. A probable (over 88%) nucleotide sequence of VGAM155 RNA is designated SEQ ID:490, and is provided hereinbelow with reference to the sequence listing part.

[2129] VGAM155 host target gene, herein designated VGAM HOST TARGET GENE, encodes a corresponding messenger RNA, VGAM155 host target RNA, herein designated VGAM HOST TARGET RNA. VGAM155 host target RNA, herein designated VGAM HOST TARGET RNA, comprises three regions, as is typical of mRNA of a protein coding gene: a 5 untranslated region, a protein coding region and a 3 untranslated region, designated 5UTR, PROTEIN CODING and 3UTR respectively.

[2130] VGAM155 RNA, herein designated VGAM RNA, binds complementarily to one or more host target binding sites located in untranslated regions of VGAM155 host target RNA, herein designated VGAM HOST TARGET RNA. This complementary binding is due to the fact that the nucleotide sequence of VGAM155 RNA, herein designated VGAM RNA, is an accurate or a partial inversed-reversed sequence of the nucleotide sequence of each of the host target binding sites. As an illustration, FIG. 1 shows 3 such host target binding sites, designated BINDING SITE I, BINDING SITE II and BINDING SITE III respectively. It is appreciated that the number of host target binding sites shown in FIG. 1 is meant as an illustration only, and is not meant to be limiting VGAM155 RNA, herein designated VGAM RNA, may have a different number of host target binding sites in untranslated regions of a VGAM155 host target RNA, herein designated VGAM HOST TARGET RNA. It is further appreciated that while FIG. 1 depicts host target binding sites in the 3UTR region, this is meant as an example only these host target binding sites may be located in the 3UTR region, the 5UTR region, or in both 3UTR and 5UTR regions.

[2131] The complementary binding of VGAM155 RNA, herein designated VGAM RNA, to host target binding sites on VGAM155 host target RNA, herein designated VGAM HOST TARGET RNA, such as BINDING SITE I, BINDING SITE II and BINDING SITE III, inhibits translation of VGAM155 host target RNA, herein designated VGAM HOST TARGET RNA, into VGAM155 host target protein, herein designated VGAM HOST TARGET PROTEIN. VGAM host target protein is therefore outlined by a broken line.

[2132] It is appreciated that VGAM155 host target gene, herein designated VGAM HOST TARGET GENE, in fact represents a plurality of VGAM155 host target genes. The mRNA of each one of this plurality of VGAM155 host target genes comprises one or more host target binding sites, each having a nucleotide sequence which is at least partly complementary to VGAM155 RNA, herein designated VGAM RNA, and which when bound by VGAM155 RNA, herein designated VGAM RNA, causes inhibition of translation of respective one or more VGAM155 host target proteins.

[2133] It is further appreciated by one skilled in the art that the mode of translational inhibition illustrated by FIG. 1 with specific reference to translational inhibition exerted by VGAM155 gene, herein designated VGAM GENE, on one or more VGAM155 host target gene, herein designated VGAM HOST TARGET GENE, is in fact common to other known non-viral miRNA genes. As mentioned hereinabove with reference to the background section, although a specific complementary binding site has been demonstrated only for some of the known miRNA genes (primarily Lin-4 and Let-7), all other recently discovered miRNA genes are also believed by those skilled in the art to modulate expression of other genes by complementary binding, although specific complementary binding sites of these other miRNA genes have not yet been found (Ruvkun G., Perspective: Glimpses of a tiny RNA world, Science 294, 779 (2001)).

[2134] It is yet further appreciated that a function of VGAM155 is inhibition of expression of host target genes, as part of a novel viral mechanism of attacking a host. Accordingly, utilities of VGAM155 include diagnosis, prevention and treatment of viral infection by Vaccinia virus. Specific functions, and accordingly utilities, of VGAM155 correlate with, and may be deduced from, the identity of the host target genes which VGAM155 binds and inhibits, and the function of these host target genes, as elaborated hereinbelow.

[2135] Nucleotide sequences of the VGAM155 precursor RNA, herein designated VGAM PRECURSOR RNA, and of the diced VGAM155 RNA, herein designated VGAM RNA, and a schematic representation of the secondary folding of VGAM155 folded precursor RNA, herein designated VGAM FOLDED PRECURSOR RNA, of VGAM155 are further described hereinbelow with reference to Table 1.

[2136] Nucleotide sequences of host target binding sites, such as BINDING SITE-I, BINDING SITE-II and BINDING SITE-III of FIG. 1, found on, and schematic representation of the complementarity of each of these host target binding sites to VGAM155 RNA, herein designated VGAM RNA, are described hereinbelow with reference to Table 2.

[2137] FIG. 1 further provides a conceptual description of another novel bioinformatically detected viral gene of the present invention, referred to here as Viral Genomic Address Messenger 156 (VGAM156) viral gene, which modulates expression of respective host target genes thereof, the function and utility of which host target genes is known in the art.

[2138] VGAM156 is a novel bioinformatically detected regulatory, non protein coding, viral micro RNA (miRNA) gene. The method by which VGAM156 was detected is described hereinabove with reference to FIGS. 2-8.

[2139] VGAM156 gene, herein designated VGAM GENE, is a viral gene contained in the genome of Vaccinia virus. VGAM156 host target gene, herein designated VGAM HOST TARGET GENE, is a human gene contained in the human genome.

[2140] VGAM156 gene, herein designated VGAM GENE, encodes a VGAM156 precursor RNA, herein designated VGAM PRECURSOR RNA. Similar to other miRNA genes, and unlike most ordinary genes, VGAM156 precursor RNA, herein designated VGAM PRECURSOR RNA, does not encode a protein. A nucleotide sequence identical or highly similar to the nucleotide sequence of VGAM156 precursor RNA is designated SEQ ID:142, and is provided hereinbelow with reference to the sequence listing part. Nucleotide sequence SEQ ID: 142 is located at position 79822 relative to the genome of Vaccinia virus.

[2141] VGAM156 precursor RNA, herein designated VGAM PRECURSOR RNA, folds onto itself, forming VGAM156 folded precursor RNA, herein designated VGAM FOLDED PRECURSOR RNA, which has a two-dimensional hairpin structure. As is well known in the art, this hairpin structure, is typical of RNA encoded by miRNA genes, and is due to the fact that the nucleotide sequence of the first half of the RNA encoded by a miRNA gene is an accurate or partial inversed-reversed sequence of the nucleotide sequence of the second half thereof.

[2142] An enzyme complex designated DICER COMPLEX, dices the VGAM156 folded precursor RNA, herein designated VGAM FOLDED PRECURSOR RNA, into VGAM156 RNA, herein designated VGAM RNA, a single stranded ˜22 nt long RNA segment. As is known in the art, dicing of a hairpin structured RNA precursor product into a short ˜22 nt RNA segment is catalyzed by an enzyme complex comprising an enzyme called Dicer together with other necessary proteins. A probable (over 83%) nucleotide sequence of VGAM156 RNA is designated SEQ ID:491, and is provided hereinbelow with reference to the sequence listing part.

[2143] VGAM156 host target gene, herein designated VGAM HOST TARGET GENE, encodes a corresponding messenger RNA, VGAM156 host target RNA, herein designated VGAM HOST TARGET RNA. VGAM156 host target RNA, herein designated VGAM HOST TARGET RNA, comprises three regions, as is typical of mRNA of a protein coding gene: a 5 untranslated region, a protein coding region and a 3 untranslated region, designated 5UTR, PROTEIN CODING and 3UTR respectively.

[2144] VGAM156 RNA, herein designated VGAM RNA, binds complementarily to one or more host target binding sites located in untranslated regions of VGAM156 host target RNA, herein designated VGAM HOST TARGET RNA. This complementary binding is due to the fact that the nucleotide sequence of VGAM156 RNA, herein designated VGAM RNA, is an accurate or a partial inversed-reversed sequence of the nucleotide sequence of each of the host target binding sites. As an illustration, FIG. 1 shows 3 such host target binding sites, designated BINDING SITE I, BINDING SITE II and BINDING SITE III respectively. It is appreciated that the number of host target binding sites shown in FIG. 1 is meant as an illustration only, and is not meant to be limiting VGAM156 RNA, herein designated VGAM RNA, may have a different number of host target binding sites in untranslated regions of a VGAM156 host target RNA, herein designated VGAM HOST TARGET RNA. It is further appreciated that while FIG. 1 depicts host target binding sites in the 3UTR region, this is meant as an example only these host target binding sites may be located in the 3UTR region, the 5UTR region, or in both 3UTR and 5UTR regions.

[2145] The complementary binding of VGAM156 RNA, herein designated VGAM RNA, to host target binding sites on VGAM156 host target RNA, herein designated VGAM HOST TARGET RNA, such as BINDING SITE I, BINDING SITE II and BINDING SITE III, inhibits translation of VGAM156 host target RNA, herein designated VGAM HOST TARGET RNA, into VGAM156 host target protein, herein designated VGAM HOST TARGET PROTEIN. VGAM host target protein is therefore outlined by a broken line.

[2146] It is appreciated that VGAM156 host target gene, herein designated VGAM HOST TARGET GENE, in fact represents a plurality of VGAM156 host target genes. The mRNA of each one of this plurality of VGAM156 host target genes comprises one or more host target binding sites, each having a nucleotide sequence which is at least partly complementary to VGAM156 RNA, herein designated VGAM RNA, and which when bound by VGAM156 RNA, herein designated VGAM RNA, causes inhibition of translation of respective one or more VGAM156 host target proteins.

[2147] It is further appreciated by one skilled in the art that the mode of translational inhibition illustrated by FIG. 1 with specific reference to translational inhibition exerted by VGAM156 gene, herein designated VGAM GENE, on one or more VGAM156 host target gene, herein designated VGAM HOST TARGET GENE, is in fact common to other known non-viral miRNA genes. As mentioned hereinabove with reference to the background section, although a specific complementary binding site has been demonstrated only for some of the known miRNA genes (primarily Lin-4 and Let-7), all other recently discovered miRNA genes are also believed by those skilled in the art to modulate expression of other genes by complementary binding, although specific complementary binding sites of these other miRNA genes have not yet been found (Ruvkun G., Perspective: Glimpses of a tiny RNA world, Science 294, 779 (2001)).

[2148] It is yet further appreciated that a function of VGAM156 is inhibition of expression of host target genes, as part of a novel viral mechanism of attacking a host. Accordingly, utilities of VGAM156 include diagnosis, prevention and treatment of viral infection by Vaccinia virus. Specific functions, and accordingly utilities, of VGAM156 correlate with, and may be deduced from, the identity of the host target genes which VGAM156 binds and inhibits, and the function of these host target genes, as elaborated hereinbelow.

[2149] Nucleotide sequences of the VGAM156 precursor RNA, herein designated VGAM PRECURSOR RNA, and of the diced VGAM156 RNA, herein designated VGAM RNA, and a schematic representation of the secondary folding of VGAM156 folded precursor RNA, herein designated VGAM FOLDED PRECURSOR RNA, of VGAM156 are further described hereinbelow with reference to Table 1.

[2150] Nucleotide sequences of host target binding sites, such as BINDING SITE-I, BINDING SITE-II and BINDING SITE-III of FIG. 1, found on, and schematic representation of the complementarity of each of these host target binding sites to VGAM156 RNA, herein designated VGAM RNA, are described hereinbelow with reference to Table 2.

[2151] FIG. 1 further provides a conceptual description of another novel bioinformatically detected viral gene of the present invention, referred to here as Viral Genomic Address Messenger 157 (VGAM157) viral gene, which modulates expression of respective host target genes thereof, the function and utility of which host target genes is known in the art.

[2152] VGAM157 is a novel bioinformatically detected regulatory, non protein coding, viral micro RNA (miRNA) gene. The method by which VGAM157 was detected is described hereinabove with reference to FIGS. 2-8.

[2153] VGAM157 gene, herein designated VGAM GENE, is a viral gene contained in the genome of Vaccinia virus. VGAM157 host target gene, herein designated VGAM HOST TARGET GENE, is a human gene contained in the human genome.

[2154] VGAM157 gene, herein designated VGAM GENE, encodes a VGAM157 precursor RNA, herein designated VGAM PRECURSOR RNA. Similar to other miRNA genes, and unlike most ordinary genes, VGAM157 precursor RNA, herein designated VGAM PRECURSOR RNA, does not encode a protein. A nucleotide sequence identical or highly similar to the nucleotide sequence of VGAM157 precursor RNA is designated SEQ ID:143, and is provided hereinbelow with reference to the sequence listing part. Nucleotide sequence SEQ ID:143 is located at position 79119 relative to the genome of Vaccinia virus.

[2155] VGAM157 precursor RNA, herein designated VGAM PRECURSOR RNA, folds onto itself, forming VGAM157 folded precursor RNA, herein designated VGAM FOLDED PRECURSOR RNA, which has a two-dimensional hairpin structure. As is well known in the art, this hairpin structure, is typical of RNA encoded by miRNA genes, and is due to the fact that the nucleotide sequence of the first half of the RNA encoded by a miRNA gene is an accurate or partial inversed-reversed sequence of the nucleotide sequence of the second half thereof.

[2156] An enzyme complex designated DICER COMPLEX, dices the VGAM157 folded precursor RNA, herein designated VGAM FOLDED PRECURSOR RNA, into VGAM157 RNA, herein designated VGAM RNA, a single stranded ˜22 nt long RNA segment. As is known in the art, dicing of a hairpin structured RNA precursor product into a short ˜22 nt RNA segment is catalyzed by an enzyme complex comprising an enzyme called Dicer together with other necessary proteins. A probable (over 70%) nucleotide sequence of VGAM157 RNA is designated SEQ ID:492, and is provided hereinbelow with reference to the sequence listing part.

[2157] VGAM157 host target gene, herein designated VGAM HOST TARGET GENE, encodes a corresponding messenger RNA, VGAM157 host target RNA, herein designated VGAM HOST TARGET RNA. VGAM157 host target RNA, herein designated VGAM HOST TARGET RNA, comprises three regions, as is typical of mRNA of a protein coding gene: a 5 untranslated region, a protein coding region and a 3 untranslated region, designated 5UTR, PROTEIN CODING and 3UTR respectively.

[2158] VGAM157 RNA, herein designated VGAM RNA, binds complementarily to one or more host target binding sites located in untranslated regions of VGAM157 host target RNA, herein designated VGAM HOST TARGET RNA. This complementary binding is due to the fact that the nucleotide sequence of VGAM157 RNA, herein designated VGAM RNA, is an accurate or a partial inversed-reversed sequence of the nucleotide sequence of each of the host target binding sites. As an illustration, FIG. 1 shows 3 such host target binding sites, designated BINDING SITE I, BINDING SITE II and BINDING SITE III respectively. It is appreciated that the number of host target binding sites shown in FIG. 1 is meant as an illustration only, and is not meant to be limiting VGAM157 RNA, herein designated VGAM RNA, may have a different number of host target binding sites in untranslated regions of a VGAM157 host target RNA, herein designated VGAM HOST TARGET RNA. It is further appreciated that while FIG. 1 depicts host target binding sites in the 3UTR region, this is meant as an example only these host target binding sites may be located in the 3UTR region, the 5UTR region, or in both 3UTR and 5UTR regions.

[2159] The complementary binding of VGAM157 RNA, herein designated VGAM RNA, to host target binding sites on VGAM157 host target RNA, herein designated VGAM HOST TARGET RNA, such as BINDING SITE I, BINDING SITE II and BINDING SITE III, inhibits translation of VGAM157 host target RNA, herein designated VGAM HOST TARGET RNA, into VGAM157 host target protein, herein designated VGAM HOST TARGET PROTEIN. VGAM host target protein is therefore outlined by a broken line.

[2160] It is appreciated that VGAM157 host target gene, herein designated VGAM HOST TARGET GENE, in fact represents a plurality of VGAM157 host target genes. The mRNA of each one of this plurality of VGAM157 host target genes comprises one or more host target binding sites, each having a nucleotide sequence which is at least partly complementary to VGAM157 RNA, herein designated VGAM RNA, and which when bound by VGAM157 RNA, herein designated VGAM RNA, causes inhibition of translation of respective one or more VGAM157 host target proteins.

[2161] It is further appreciated by one skilled in the art that the mode of translational inhibition illustrated by FIG. 1 with specific reference to translational inhibition exerted by VGAM157 gene, herein designated VGAM GENE, on one or more VGAM157 host target gene, herein designated VGAM HOST TARGET GENE, is in fact common to other known non-viral miRNA genes. As mentioned hereinabove with reference to the background section, although a specific complementary binding site has been demonstrated only for some of the known miRNA genes (primarily Lin-4 and Let-7), all other recently discovered miRNA genes are also believed by those skilled in the art to modulate expression of other genes by complementary binding, although specific complementary binding sites of these other miRNA genes have not yet been found (Ruvkun G., Perspective: Glimpses of a tiny RNA world, Science 294, 779 (2001)).

[2162] It is yet further appreciated that a function of VGAM157 is inhibition of expression of host target genes, as part of a novel viral mechanism of attacking a host. Accordingly, utilities of VGAM157 include diagnosis, prevention and treatment of viral infection by Vaccinia virus. Specific functions, and accordingly utilities, of VGAM157 correlate with, and may be deduced from, the identity of the host target genes which VGAM157 binds and inhibits, and the function of these host target genes, as elaborated hereinbelow.

[2163] Nucleotide sequences of the VGAM157 precursor RNA, herein designated VGAM PRECURSOR RNA, and of the diced VGAM157 RNA, herein designated VGAM RNA, and a schematic representation of the secondary folding of VGAM157 folded precursor RNA, herein designated VGAM FOLDED PRECURSOR RNA, of VGAM157 are further described hereinbelow with reference to Table 1.

[2164] Nucleotide sequences of host target binding sites, such as BINDING SITE-I, BINDING SITE-II and BINDING SITE-III of FIG. 1, found on, and schematic representation of the complementarity of each of these host target binding sites to VGAM157 RNA, herein designated VGAM RNA, are described hereinbelow with reference to Table 2.

[2165] FIG. 1 further provides a conceptual description of another novel bioinformatically detected viral gene of the present invention, referred to here as Viral Genomic Address Messenger 158 (VGAM158) viral gene, which modulates expression of respective host target genes thereof, the function and utility of which host target genes is known in the art.

[2166] VGAM158 is a novel bioinformatically detected regulatory, non protein coding, viral micro RNA (miRNA) gene. The method by which VGAM158 was detected is described hereinabove with reference to FIGS. 2-8.

[2167] VGAM158 gene, herein designated VGAM GENE, is a viral gene contained in the genome of Vaccinia virus. VGAM158 host target gene, herein designated VGAM HOST TARGET GENE, is a human gene contained in the human genome.

[2168] VGAM158 gene, herein designated VGAM GENE, encodes a VGAM158 precursor RNA, herein designated VGAM PRECURSOR RNA. Similar to other miRNA genes, and unlike most ordinary genes, VGAM158 precursor RNA, herein designated VGAM PRECURSOR RNA, does not encode a protein. A nucleotide sequence identical or highly similar to the nucleotide sequence of VGAM158 precursor RNA is designated SEQ ID:144, and is provided hereinbelow with reference to the sequence listing part. Nucleotide sequence SEQ ID:144 is located at position 81571 relative to the genome of Vaccinia virus.

[2169] VGAM158 precursor RNA, herein designated VGAM PRECURSOR RNA, folds onto itself, forming VGAM158 folded precursor RNA, herein designated VGAM FOLDED PRECURSOR RNA, which has a two-dimensional hairpin structure. As is well known in the art, this hairpin structure, is typical of RNA encoded by miRNA genes, and is due to the fact that the nucleotide sequence of the first half of the RNA encoded by a miRNA gene is an accurate or partial inversed-reversed sequence of the nucleotide sequence of the second half thereof.

[2170] An enzyme complex designated DICER COMPLEX, dices the VGAM158 folded precursor RNA, herein designated VGAM FOLDED PRECURSOR RNA, into VGAM158 RNA, herein designated VGAM RNA, a single stranded ˜22 nt long RNA segment. As is known in the art, dicing of a hairpin structured RNA precursor product into a short ˜22 nt RNA segment is catalyzed by an enzyme complex comprising an enzyme called Dicer together with other necessary proteins. A probable (over 82%) nucleotide sequence of VGAM158 RNA is designated SEQ ID:493, and is provided hereinbelow with reference to the sequence listing part.

[2171] VGAM158 host target gene, herein designated VGAM HOST TARGET GENE, encodes a corresponding messenger RNA, VGAM158 host target RNA, herein designated VGAM HOST TARGET RNA. VGAM158 host target RNA, herein designated VGAM HOST TARGET RNA, comprises three regions, as is typical of mRNA of a protein coding gene: a 5 untranslated region, a protein coding region and a 3 untranslated region, designated 5UTR, PROTEIN CODING and 3UTR respectively.

[2172] VGAM158 RNA, herein designated VGAM RNA, binds complementarily to one or more host target binding sites located in untranslated regions of VGAM158 host target RNA, herein designated VGAM HOST TARGET RNA. This complementary binding is due to the fact that the nucleotide sequence of VGAM158 RNA, herein designated VGAM RNA, is an accurate or a partial inversed-reversed sequence of the nucleotide sequence of each of the host target binding sites. As an illustration, FIG. 1 shows 3 such host target binding sites, designated BINDING SITE I, BINDING SITE II and BINDING SITE III respectively. It is appreciated that the number of host target binding sites shown in FIG. 1 is meant as an illustration only, and is not meant to be limiting VGAM158 RNA, herein designated VGAM RNA, may have a different number of host target binding sites in untranslated regions of a VGAM158 host target RNA, herein designated VGAM HOST TARGET RNA. It is further appreciated that while FIG. 1 depicts host target binding sites in the 3UTR region, this is meant as an example only these host target binding sites may be located in the 3UTR region, the 5UTR region, or in both 3UTR and 5UTR regions.

[2173] The complementary binding of VGAM158 RNA, herein designated VGAM RNA, to host target binding sites on VGAM158 host target RNA, herein designated VGAM HOST TARGET RNA, such as BINDING SITE I, BINDING SITE II and BINDING SITE III, inhibits translation of VGAM158 host target RNA, herein designated VGAM HOST TARGET RNA, into VGAM158 host target protein, herein designated VGAM HOST TARGET PROTEIN. VGAM host target protein is therefore outlined by a broken line.

[2174] It is appreciated that VGAM158 host target gene, herein designated VGAM HOST TARGET GENE, in fact represents a plurality of VGAM158 host target genes. The mRNA of each one of this plurality of VGAM158 host target genes comprises one or more host target binding sites, each having a nucleotide sequence which is at least partly complementary to VGAM158 RNA, herein designated VGAM RNA, and which when bound by VGAM158 RNA, herein designated VGAM RNA, causes inhibition of translation of respective one or more VGAM158 host target proteins.

[2175] It is further appreciated by one skilled in the art that the mode of translational inhibition illustrated by FIG. 1 with specific reference to translational inhibition exerted by VGAM158 gene, herein designated VGAM GENE, on one or more VGAM158 host target gene, herein designated VGAM HOST TARGET GENE, is in fact common to other known non-viral miRNA genes. As mentioned hereinabove with reference to the background section, although a specific complementary binding site has been demonstrated only for some of the known miRNA genes (primarily Lin-4 and Let-7), all other recently discovered miRNA genes are also believed by those skilled in the art to modulate expression of other genes by complementary binding, although specific complementary binding sites of these other miRNA genes have not yet been found (Ruvkun G., Perspective: Glimpses of a tiny RNA world, Science 294, 779 (2001)).

[2176] It is yet further appreciated that a function of VGAM158 is inhibition of expression of host target genes, as part of a novel viral mechanism of attacking a host. Accordingly, utilities of VGAM158 include diagnosis, prevention and treatment of viral infection by Vaccinia virus. Specific functions, and accordingly utilities, of VGAM158 correlate with, and may be deduced from, the identity of the host target genes which VGAM158 binds and inhibits, and the function of these host target genes, as elaborated hereinbelow.

[2177] Nucleotide sequences of the VGAM158 precursor RNA, herein designated VGAM PRECURSOR RNA, and of the diced VGAM158 RNA, herein designated VGAM RNA, and a schematic representation of the secondary folding of VGAM158 folded precursor RNA, herein designated VGAM FOLDED PRECURSOR RNA, of VGAM158 are further described hereinbelow with reference to Table 1.

[2178] Nucleotide sequences of host target binding sites, such as BINDING SITE-I, BINDING SITE-II and BINDING SITE-III of FIG. 1, found on, and schematic representation of the complementarity of each of these host target binding sites to VGAM158 RNA, herein designated VGAM RNA, are described hereinbelow with reference to Table 2.

[2179] FIG. 1 further provides a conceptual description of another novel bioinformatically detected viral gene of the present invention, referred to here as Viral Genomic Address Messenger 159 (VGAM159) viral gene, which modulates expression of respective host target genes thereof, the function and utility of which host target genes is known in the art.

[2180] VGAM159 is a novel bioinformatically detected regulatory, non protein coding, viral micro RNA (miRNA) gene. The method by which VGAM159 was detected is described hereinabove with reference to FIGS. 2-8.

[2181] VGAM159 gene, herein designated VGAM GENE, is a viral gene contained in the genome of Vaccinia virus. VGAM159 host target gene, herein designated VGAM HOST TARGET GENE, is a human gene contained in the human genome.

[2182] VGAM159 gene, herein designated VGAM GENE, encodes a VGAM159 precursor RNA, herein designated VGAM PRECURSOR RNA. Similar to other miRNA genes, and unlike most ordinary genes, VGAM159 precursor RNA, herein designated VGAM PRECURSOR RNA, does not encode a protein. A nucleotide sequence identical or highly similar to the nucleotide sequence of VGAM159 precursor RNA is designated SEQ ID:145, and is provided hereinbelow with reference to the sequence listing part. Nucleotide sequence SEQ ID:145 is located at position 81761 relative to the genome of Vaccinia virus.

[2183] VGAM159 precursor RNA, herein designated VGAM PRECURSOR RNA, folds onto itself, forming VGAM159 folded precursor RNA, herein designated VGAM FOLDED PRECURSOR RNA, which has a two-dimensional hairpin structure. As is well known in the art, this hairpin structure, is typical of RNA encoded by miRNA genes, and is due to the fact that the nucleotide sequence of the first half of the RNA encoded by a miRNA gene is an accurate or partial inversed-reversed sequence of the nucleotide sequence of the second half thereof.

[2184] An enzyme complex designated DICER COMPLEX, dices the VGAM159 folded precursor RNA, herein designated VGAM FOLDED PRECURSOR RNA, into VGAM159 RNA, herein designated VGAM RNA, a single stranded ˜22 nt long RNA segment. As is known in the art, dicing of a hairpin structured RNA precursor product into a short ˜22 nt RNA segment is catalyzed by an enzyme complex comprising an enzyme called Dicer together with other necessary proteins. A probable (over 85%) nucleotide sequence of VGAM159 RNA is designated SEQ ID:494, and is provided hereinbelow with reference to the sequence listing part.

[2185] VGAM159 host target gene, herein designated VGAM HOST TARGET GENE, encodes a corresponding messenger RNA, VGAM159 host target RNA, herein designated VGAM HOST TARGET RNA. VGAM159 host target RNA, herein designated VGAM HOST TARGET RNA, comprises three regions, as is typical of mRNA of a protein coding gene: a 5 untranslated region, a protein coding region and a 3 untranslated region, designated 5UTR, PROTEIN CODING and 3UTR respectively.

[2186] VGAM159 RNA, herein designated VGAM RNA, binds complementarily to one or more host target binding sites located in untranslated regions of VGAM159 host target RNA, herein designated VGAM HOST TARGET RNA. This complementary binding is due to the fact that the nucleotide sequence of VGAM159 RNA, herein designated VGAM RNA, is an accurate or a partial inversed-reversed sequence of the nucleotide sequence of each of the host target binding sites. As an illustration, FIG. 1 shows 3 such host target binding sites, designated BINDING SITE I, BINDING SITE II and BINDING SITE III respectively. It is appreciated that the number of host target binding sites shown in FIG. 1 is meant as an illustration only, and is not meant to be limiting VGAM159 RNA, herein designated VGAM RNA, may have a different number of host target binding sites in untranslated regions of a VGAM159 host target RNA, herein designated VGAM HOST TARGET RNA. It is further appreciated that while FIG. 1 depicts host target binding sites in the 3UTR region, this is meant as an example only these host target binding sites may be located in the 3UTR region, the 5UTR region, or in both 3UTR and 5UTR regions.

[2187] The complementary binding of VGAM159 RNA, herein designated VGAM RNA, to host target binding sites on VGAM159 host target RNA, herein designated VGAM HOST TARGET RNA, such as BINDING SITE I, BINDING SITE II and BINDING SITE III, inhibits translation of VGAM159 host target RNA, herein designated VGAM HOST TARGET RNA, into VGAM159 host target protein, herein designated VGAM HOST TARGET PROTEIN. VGAM host target protein is therefore outlined by a broken line.

[2188] It is appreciated that VGAM159 host target gene, herein designated VGAM HOST TARGET GENE, in fact represents a plurality of VGAM159 host target genes. The mRNA of each one of this plurality of VGAM159 host target genes comprises one or more host target binding sites, each having a nucleotide sequence which is at least partly complementary to VGAM159 RNA, herein designated VGAM RNA, and which when bound by VGAM159 RNA, herein designated VGAM RNA, causes inhibition of translation of respective one or more VGAM159 host target proteins.

[2189] It is further appreciated by one skilled in the art that the mode of translational inhibition illustrated by FIG. 1 with specific reference to translational inhibition exerted by VGAM159 gene, herein designated VGAM GENE, on one or more VGAM159 host target gene, herein designated VGAM HOST TARGET GENE, is in fact common to other known non-viral miRNA genes. As mentioned hereinabove with reference to the background section, although a specific complementary binding site has been demonstrated only for some of the known miRNA genes (primarily Lin-4 and Let-7), all other recently discovered miRNA genes are also believed by those skilled in the art to modulate expression of other genes by complementary binding, although specific complementary binding sites of these other miRNA genes have not yet been found (Ruvkun G., Perspective: Glimpses of a tiny RNA world, Science 294, 779 (2001)).

[2190] It is yet further appreciated that a function of VGAM159 is inhibition of expression of host target genes, as part of a novel viral mechanism of attacking a host. Accordingly, utilities of VGAM159 include diagnosis, prevention and treatment of viral infection by Vaccinia virus. Specific functions, and accordingly utilities, of VGAM159 correlate with, and may be deduced from, the identity of the host target genes which VGAM159 binds and inhibits, and the function of these host target genes, as elaborated hereinbelow.

[2191] Nucleotide sequences of the VGAM159 precursor RNA, herein designated VGAM PRECURSOR RNA, and of the diced VGAM159 RNA, herein designated VGAM RNA, and a schematic representation of the secondary folding of VGAM159 folded precursor RNA, herein designated VGAM FOLDED PRECURSOR RNA, of VGAM159 are further described hereinbelow with reference to Table 1.

[2192] Nucleotide sequences of host target binding sites, such as BINDING SITE-I, BINDING SITE-II and BINDING SITE-III of FIG. 1, found on, and schematic representation of the complementarity of each of these host target binding sites to VGAM159 RNA, herein designated VGAM RNA, are described hereinbelow with reference to Table 2.

[2193] FIG. 1 further provides a conceptual description of another novel bioinformatically detected viral gene of the present invention, referred to here as Viral Genomic Address Messenger 160 (VGAM160) viral gene, which modulates expression of respective host target genes thereof, the function and utility of which host target genes is known in the art.

[2194] VGAM160 is a novel bioinformatically detected regulatory, non protein coding, viral micro RNA (miRNA) gene. The method by which VGAM160 was detected is described hereinabove with reference to FIGS. 2-8.

[2195] VGAM160 gene, herein designated VGAM GENE, is a viral gene contained in the genome of Vaccinia virus. VGAM160 host target gene, herein designated VGAM HOST TARGET GENE, is a human gene contained in the human genome.

[2196] VGAM160 gene, herein designated VGAM GENE, encodes a VGAM160 precursor RNA, herein designated VGAM PRECURSOR RNA. Similar to other miRNA genes, and unlike most ordinary genes, VGAM160 precursor RNA, herein designated VGAM PRECURSOR RNA, does not encode a protein. A nucleotide sequence identical or highly similar to the nucleotide sequence of VGAM160 precursor RNA is designated SEQ ID:146, and is provided hereinbelow with reference to the sequence listing part. Nucleotide sequence SEQ ID:146 is located at position 81960 relative to the genome of Vaccinia virus.

[2197] VGAM160 precursor RNA, herein designated VGAM PRECURSOR RNA, folds onto itself, forming VGAM160 folded precursor RNA, herein designated VGAM FOLDED PRECURSOR RNA, which has a two-dimensional hairpin structure. As is well known in the art, this hairpin structure, is typical of RNA encoded by miRNA genes, and is due to the fact that the nucleotide sequence of the first half of the RNA encoded by a miRNA gene is an accurate or partial inversed-reversed sequence of the nucleotide sequence of the second half thereof.

[2198] An enzyme complex designated DICER COMPLEX, dices the VGAM160 folded precursor RNA, herein designated VGAM FOLDED PRECURSOR RNA, into VGAM160 RNA, herein designated VGAM RNA, a single stranded ˜22 nt long RNA segment. As is known in the art, dicing of a hairpin structured RNA precursor product into a short ˜22 nt RNA segment is catalyzed by an enzyme complex comprising an enzyme called Dicer together with other necessary proteins. A probable (over 86%) nucleotide sequence of VGAM160 RNA is designated SEQ ID:495, and is provided hereinbelow with reference to the sequence listing part.

[2199] VGAM160 host target gene, herein designated VGAM HOST TARGET GENE, encodes a corresponding messenger RNA, VGAM160 host target RNA, herein designated VGAM HOST TARGET RNA. VGAM160 host target RNA, herein designated VGAM HOST TARGET RNA, comprises three regions, as is typical of mRNA of a protein coding gene: a 5 untranslated region, a protein coding region and a 3 untranslated region, designated 5UTR, PROTEIN CODING and 3UTR respectively.

[2200] VGAM160 RNA, herein designated VGAM RNA, binds complementarily to one or more host target binding sites located in untranslated regions of VGAM160 host target RNA, herein designated VGAM HOST TARGET RNA. This complementary binding is due to the fact that the nucleotide sequence of VGAM160 RNA, herein designated VGAM RNA, is an accurate or a partial inversed-reversed sequence of the nucleotide sequence of each of the host target binding sites. As an illustration, FIG. 1 shows 3 such host target binding sites, designated BINDING SITE I, BINDING SITE II and BINDING SITE III respectively. It is appreciated that the number of host target binding sites shown in FIG. 1 is meant as an illustration only, and is not meant to be limiting VGAM160 RNA, herein designated VGAM RNA, may have a different number of host target binding sites in untranslated regions of a VGAM160 host target RNA, herein designated VGAM HOST TARGET RNA. It is further appreciated that while FIG. 1 depicts host target binding sites in the 3UTR region, this is meant as an example only these host target binding sites may be located in the 3UTR region, the 5UTR region, or in both 3UTR and 5UTR regions.

[2201] The complementary binding of VGAM160 RNA, herein designated VGAM RNA, to host target binding sites on VGAM160 host target RNA, herein designated VGAM HOST TARGET RNA, such as BINDING SITE I, BINDING SITE II and BINDING SITE III, inhibits translation of VGAM160 host target RNA, herein designated VGAM HOST TARGET RNA, into VGAM160 host target protein, herein designated VGAM HOST TARGET PROTEIN. VGAM host target protein is therefore outlined by a broken line.

[2202] It is appreciated that VGAM160 host target gene, herein designated VGAM HOST TARGET GENE, in fact represents a plurality of VGAM160 host target genes. The mRNA of each one of this plurality of VGAM160 host target genes comprises one or more host target binding sites, each having a nucleotide sequence which is at least partly complementary to VGAM160 RNA, herein designated VGAM RNA, and which when bound by VGAM160 RNA, herein designated VGAM RNA, causes inhibition of translation of respective one or more VGAM160 host target proteins.

[2203] It is further appreciated by one skilled in the art that the mode of translational inhibition illustrated by FIG. 1 with specific reference to translational inhibition exerted by VGAM160 gene, herein designated VGAM GENE, on one or more VGAM160 host target gene, herein designated VGAM HOST TARGET GENE, is in fact common to other known non-viral miRNA genes. As mentioned hereinabove with reference to the background section, although a specific complementary binding site has been demonstrated only for some of the known miRNA genes (primarily Lin-4 and Let-7), all other recently discovered miRNA genes are also believed by those skilled in the art to modulate expression of other genes by complementary binding, although specific complementary binding sites of these other miRNA genes have not yet been found (Ruvkun G., Perspective: Glimpses of a tiny RNA world, Science 294, 779 (2001)).

[2204] It is yet further appreciated that a function of VGAM160 is inhibition of expression of host target genes, as part of a novel viral mechanism of attacking a host. Accordingly, utilities of VGAM160 include diagnosis, prevention and treatment of viral infection by Vaccinia virus. Specific functions, and accordingly utilities, of VGAM160 correlate with, and may be deduced from, the identity of the host target genes which VGAM160 binds and inhibits, and the function of these host target genes, as elaborated hereinbelow.

[2205] Nucleotide sequences of the VGAM160 precursor RNA, herein designated VGAM PRECURSOR RNA, and of the diced VGAM160 RNA, herein designated VGAM RNA, and a schematic representation of the secondary folding of VGAM160 folded precursor RNA, herein designated VGAM FOLDED PRECURSOR RNA, of VGAM160 are further described hereinbelow with reference to Table 1.

[2206] Nucleotide sequences of host target binding sites, such as BINDING SITE-I, BINDING SITE-II and BINDING SITE-III of FIG. 1, found on, and schematic representation of the complementarity of each of these host target binding sites to VGAM160 RNA, herein designated VGAM RNA, are described hereinbelow with reference to Table 2.

[2207] FIG. 1 further provides a conceptual description of another novel bioinformatically detected viral gene of the present invention, referred to here as Viral Genomic Address Messenger 161 (VGAM161) viral gene, which modulates expression of respective host target genes thereof, the function and utility of which host target genes is known in the art.

[2208] VGAM161 is a novel bioinformatically detected regulatory, non protein coding, viral micro RNA (miRNA) gene. The method by which VGAM161 was detected is described hereinabove with reference to FIGS. 2-8.

[2209] VGAM161 gene, herein designated VGAM GENE, is a viral gene contained in the genome of Vaccinia virus. VGAM161 host target gene, herein designated VGAM HOST TARGET GENE, is a human gene contained in the human genome.

[2210] VGAM161 gene, herein designated VGAM GENE, encodes a VGAM161 precursor RNA, herein designated VGAM PRECURSOR RNA. Similar to other miRNA genes, and unlike most ordinary genes, VGAM161 precursor RNA, herein designated VGAM PRECURSOR RNA, does not encode a protein. A nucleotide sequence identical or highly similar to the nucleotide sequence of VGAM161 precursor RNA is designated SEQ ID:147, and is provided hereinbelow with reference to the sequence listing part. Nucleotide sequence SEQ ID:147 is located at position 81428 relative to the genome of Vaccinia virus.

[2211] VGAM161 precursor RNA, herein designated VGAM PRECURSOR RNA, folds onto itself, forming VGAM161 folded precursor RNA, herein designated VGAM FOLDED PRECURSOR RNA, which has a two-dimensional hairpin structure. As is well known in the art, this hairpin structure, is typical of RNA encoded by miRNA genes, and is due to the fact that the nucleotide sequence of the first half of the RNA encoded by a miRNA gene is an accurate or partial inversed-reversed sequence of the nucleotide sequence of the second half thereof.

[2212] An enzyme complex designated DICER COMPLEX, dices the VGAM161 folded precursor RNA, herein designated VGAM FOLDED PRECURSOR RNA, into VGAM161 RNA, herein designated VGAM RNA, a single stranded ˜22 nt long RNA segment. As is known in the art, dicing of a hairpin structured RNA precursor product into a short ˜22 nt RNA segment is catalyzed by an enzyme complex comprising an enzyme called Dicer together with other necessary proteins. A probable (over 72%) nucleotide sequence of VGAM161 RNA is designated SEQ ID:496, and is provided hereinbelow with reference to the sequence listing part.

[2213] VGAM161 host target gene, herein designated VGAM HOST TARGET GENE, encodes a corresponding messenger RNA, VGAM161 host target RNA, herein designated VGAM HOST TARGET RNA. VGAM161 host target RNA, herein designated VGAM HOST TARGET RNA, comprises three regions, as is typical of mRNA of a protein coding gene: a 5 untranslated region, a protein coding region and a 3 untranslated region, designated 5UTR, PROTEIN CODING and 3UTR respectively.

[2214] VGAM161 RNA, herein designated VGAM RNA, binds complementarily to one or more host target binding sites located in untranslated regions of VGAM161 host target RNA, herein designated VGAM HOST TARGET RNA. This complementary binding is due to the fact that the nucleotide sequence of VGAM161 RNA, herein designated VGAM RNA, is an accurate or a partial inversed-reversed sequence of the nucleotide sequence of each of the host target binding sites. As an illustration, FIG. 1 shows 3 such host target binding sites, designated BINDING SITE I, BINDING SITE II and BINDING SITE III respectively. It is appreciated that the number of host target binding sites shown in FIG. 1 is meant as an illustration only, and is not meant to be limiting VGAM161 RNA, herein designated VGAM RNA, may have a different number of host target binding sites in untranslated regions of a VGAM161 host target RNA, herein designated VGAM HOST TARGET RNA. It is further appreciated that while FIG. 1 depicts host target binding sites in the 3UTR region, this is meant as an example only these host target binding sites may be located in the 3UTR region, the 5UTR region, or in both 3UTR and 5UTR regions.

[2215] The complementary binding of VGAM161 RNA, herein designated VGAM RNA, to host target binding sites on VGAM161 host target RNA, herein designated VGAM HOST TARGET RNA, such as BINDING SITE I, BINDING SITE II and BINDING SITE III, inhibits translation of VGAM161 host target RNA, herein designated VGAM HOST TARGET RNA, into VGAM161 host target protein, herein designated VGAM HOST TARGET PROTEIN. VGAM host target protein is therefore outlined by a broken line.

[2216] It is appreciated that VGAM161 host target gene, herein designated VGAM HOST TARGET GENE, in fact represents a plurality of VGAM161 host target genes. The mRNA of each one of this plurality of VGAM161 host target genes comprises one or more host target binding sites, each having a nucleotide sequence which is at least partly complementary to VGAM161 RNA, herein designated VGAM RNA, and which when bound by VGAM161 RNA, herein designated VGAM RNA, causes inhibition of translation of respective one or more VGAM161 host target proteins.

[2217] It is further appreciated by one skilled in the art that the mode of translational inhibition illustrated by FIG. 1 with specific reference to translational inhibition exerted by VGAM161 gene, herein designated VGAM GENE, on one or more VGAM161 host target gene, herein designated VGAM HOST TARGET GENE, is in fact common to other known non-viral miRNA genes. As mentioned hereinabove with reference to the background section, although a specific complementary binding site has been demonstrated only for some of the known miRNA genes (primarily Lin-4 and Let-7), all other recently discovered miRNA genes are also believed by those skilled in the art to modulate expression of other genes by complementary binding, although specific complementary binding sites of these other miRNA genes have not yet been found (Ruvkun G., Perspective: Glimpses of a tiny RNA world, Science 294, 779 (2001)).

[2218] It is yet further appreciated that a function of VGAM161 is inhibition of expression of host target genes, as part of a novel viral mechanism of attacking a host. Accordingly, utilities of VGAM161 include diagnosis, prevention and treatment of viral infection by Vaccinia virus. Specific functions, and accordingly utilities, of VGAM161 correlate with, and may be deduced from, the identity of the host target genes which VGAM161 binds and inhibits, and the function of these host target genes, as elaborated hereinbelow.

[2219] Nucleotide sequences of the VGAM161 precursor RNA, herein designated VGAM PRECURSOR RNA, and of the diced VGAM161 RNA, herein designated VGAM RNA, and a schematic representation of the secondary folding of VGAM161 folded precursor RNA, herein designated VGAM FOLDED PRECURSOR RNA, of VGAM161 are further described hereinbelow with reference to Table 1.

[2220] Nucleotide sequences of host target binding sites, such as BINDING SITE-I, BINDING SITE-II and BINDING SITE-III of FIG. 1, found on, and schematic representation of the complementarity of each of these host target binding sites to VGAM161 RNA, herein designated VGAM RNA, are described hereinbelow with reference to Table 2.

[2221] FIG. 1 further provides a conceptual description of another novel bioinformatically detected viral gene of the present invention, referred to here as Viral Genomic Address Messenger 162 (VGAM162) viral gene, which modulates expression of respective host target genes thereof, the function and utility of which host target genes is known in the art.

[2222] VGAM162 is a novel bioinformatically detected regulatory, non protein coding, viral micro RNA (miRNA) gene. The method by which VGAM162 was detected is described hereinabove with reference to FIGS. 2-8.

[2223] VGAM162 gene, herein designated VGAM GENE, is a viral gene contained in the genome of Vaccinia virus. VGAM162 host target gene, herein designated VGAM HOST TARGET GENE, is a human gene contained in the human genome.

[2224] VGAM162 gene, herein designated VGAM GENE, encodes a VGAM162 precursor RNA, herein designated VGAM PRECURSOR RNA. Similar to other miRNA genes, and unlike most ordinary genes, VGAM162 precursor RNA, herein designated VGAM PRECURSOR RNA, does not encode a protein. A nucleotide sequence identical or highly similar to the nucleotide sequence of VGAM162 precursor RNA is designated SEQ ID:148, and is provided hereinbelow with reference to the sequence listing part. Nucleotide sequence SEQ ID:148 is located at position 81204 relative to the genome of Vaccinia virus.

[2225] VGAM162 precursor RNA, herein designated VGAM PRECURSOR RNA, folds onto itself, forming VGAM162 folded precursor RNA, herein designated VGAM FOLDED PRECURSOR RNA, which has a two-dimensional hairpin structure. As is well known in the art, this hairpin structure, is typical of RNA encoded by miRNA genes, and is due to the fact that the nucleotide sequence of the first half of the RNA encoded by a miRNA gene is an accurate or partial inversed-reversed sequence of the nucleotide sequence of the second half thereof.

[2226] An enzyme complex designated DICER COMPLEX, dices the VGAM162 folded precursor RNA, herein designated VGAM FOLDED PRECURSOR RNA, into VGAM162 RNA, herein designated VGAM RNA, a single stranded ˜22 nt long RNA segment. As is known in the art, dicing of a hairpin structured RNA precursor product into a short ˜22 nt RNA segment is catalyzed by an enzyme complex comprising an enzyme called Dicer together with other necessary proteins. A probable (over 77%) nucleotide sequence of VGAM162 RNA is designated SEQ ID:497, and is provided hereinbelow with reference to the sequence listing part.

[2227] VGAM162 host target gene, herein designated VGAM HOST TARGET GENE, encodes a corresponding messenger RNA, VGAM162 host target RNA, herein designated VGAM HOST TARGET RNA. VGAM162 host target RNA, herein designated VGAM HOST TARGET RNA, comprises three regions, as is typical of mRNA of a protein coding gene: a 5 untranslated region, a protein coding region and a 3 untranslated region, designated 5UTR, PROTEIN CODING and 3UTR respectively.

[2228] VGAM162 RNA, herein designated VGAM RNA, binds complementarily to one or more host target binding sites located in untranslated regions of VGAM162 host target RNA, herein designated VGAM HOST TARGET RNA. This complementary binding is due to the fact that the nucleotide sequence of VGAM162 RNA, herein designated VGAM RNA, is an accurate or a partial inversed-reversed sequence of the nucleotide sequence of each of the host target binding sites. As an illustration, FIG. 1 shows 3 such host target binding sites, designated BINDING SITE I, BINDING SITE II and BINDING SITE III respectively. It is appreciated that the number of host target binding sites shown in FIG. 1 is meant as an illustration only, and is not meant to be limiting VGAM162 RNA, herein designated VGAM RNA, may have a different number of host target binding sites in untranslated regions of a VGAM162 host target RNA, herein designated VGAM HOST TARGET RNA. It is further appreciated that while FIG. 1 depicts host target binding sites in the 3UTR region, this is meant as an example only these host target binding sites may be located in the 3UTR region, the 5UTR region, or in both 3UTR and 5UTR regions.

[2229] The complementary binding of VGAM162 RNA, herein designated VGAM RNA, to host target binding sites on VGAM162 host target RNA, herein designated VGAM HOST TARGET RNA, such as BINDING SITE I, BINDING SITE II and BINDING SITE III, inhibits translation of VGAM162 host target RNA, herein designated VGAM HOST TARGET RNA, into VGAM162 host target protein, herein designated VGAM HOST TARGET PROTEIN. VGAM host target protein is therefore outlined by a broken line.

[2230] It is appreciated that VGAM162 host target gene, herein designated VGAM HOST TARGET GENE, in fact represents a plurality of VGAM162 host target genes. The mRNA of each one of this plurality of VGAM162 host target genes comprises one or more host target binding sites, each having a nucleotide sequence which is at least partly complementary to VGAM162 RNA, herein designated VGAM RNA, and which when bound by VGAM162 RNA, herein designated VGAM RNA, causes inhibition of translation of respective one or more VGAM162 host target proteins.

[2231] It is further appreciated by one skilled in the art that the mode of translational inhibition illustrated by FIG. 1 with specific reference to translational inhibition exerted by VGAM162 gene, herein designated VGAM GENE, on one or more VGAM162 host target gene, herein designated VGAM HOST TARGET GENE, is in fact common to other known non-viral miRNA genes. As mentioned hereinabove with reference to the background section, although a specific complementary binding site has been demonstrated only for some of the known miRNA genes (primarily Lin-4 and Let-7), all other recently discovered miRNA genes are also believed by those skilled in the art to modulate expression of other genes by complementary binding, although specific complementary binding sites of these other miRNA genes have not yet been found (Ruvkun G., Perspective: Glimpses of a tiny RNA world, Science 294, 779 (2001)).

[2232] It is yet further appreciated that a function of VGAM162 is inhibition of expression of host target genes, as part of a novel viral mechanism of attacking a host. Accordingly, utilities of VGAM162 include diagnosis, prevention and treatment of viral infection by Vaccinia virus. Specific functions, and accordingly utilities, of VGAM162 correlate with, and may be deduced from, the identity of the host target genes which VGAM162 binds and inhibits, and the function of these host target genes, as elaborated hereinbelow.

[2233] Nucleotide sequences of the VGAM162 precursor RNA, herein designated VGAM PRECURSOR RNA, and of the diced VGAM162 RNA, herein designated VGAM RNA, and a schematic representation of the secondary folding of VGAM162 folded precursor RNA, herein designated VGAM FOLDED PRECURSOR RNA, of VGAM162 are further described hereinbelow with reference to Table 1.

[2234] Nucleotide sequences of host target binding sites, such as BINDING SITE-I, BINDING SITE-II and BINDING SITE-III of FIG. 1, found on, and schematic representation of the complementarity of each of these host target binding sites to VGAM162 RNA, herein designated VGAM RNA, are described hereinbelow with reference to Table 2.

[2235] FIG. 1 further provides a conceptual description of another novel bioinformatically detected viral gene of the present invention, referred to here as Viral Genomic Address Messenger 163 (VGAM163) viral gene, which modulates expression of respective host target genes thereof, the function and utility of which host target genes is known in the art.

[2236] VGAM163 is a novel bioinformatically detected regulatory, non protein coding, viral micro RNA (miRNA) gene. The method by which VGAM163 was detected is described hereinabove with reference to FIGS. 2-8.

[2237] VGAM163 gene, herein designated VGAM GENE, is a viral gene contained in the genome of Vaccinia virus. VGAM163 host target gene, herein designated VGAM HOST TARGET GENE, is a human gene contained in the human genome.

[2238] VGAM163 gene, herein designated VGAM GENE, encodes a VGAM163 precursor RNA, herein designated VGAM PRECURSOR RNA. Similar to other miRNA genes, and unlike most ordinary genes, VGAM163 precursor RNA, herein designated VGAM PRECURSOR RNA, does not encode a protein. A nucleotide sequence identical or highly similar to the nucleotide sequence of VGAM163 precursor RNA is designated SEQ ID:149, and is provided hereinbelow with reference to the sequence listing part. Nucleotide sequence SEQ ID: 149 is located at position 83968 relative to the genome of Vaccinia virus.

[2239] VGAM163 precursor RNA, herein designated VGAM PRECURSOR RNA, folds onto itself, forming VGAM163 folded precursor RNA, herein designated VGAM FOLDED PRECURSOR RNA, which has a two-dimensional hairpin structure. As is well known in the art, this hairpin structure, is typical of RNA encoded by miRNA genes, and is due to the fact that the nucleotide sequence of the first half of the RNA encoded by a miRNA gene is an accurate or partial inversed-reversed sequence of the nucleotide sequence of the second half thereof.

[2240] An enzyme complex designated DICER COMPLEX, dices the VGAM163 folded precursor RNA, herein designated VGAM FOLDED PRECURSOR RNA, into VGAM163 RNA, herein designated VGAM RNA, a single stranded ˜22 nt long RNA segment. As is known in the art, dicing of a hairpin structured RNA precursor product into a short ˜22 nt RNA segment is catalyzed by an enzyme complex comprising an enzyme called Dicer together with other necessary proteins. A probable (over 73%) nucleotide sequence of VGAM163 RNA is designated SEQ ID:498, and is provided hereinbelow with reference to the sequence listing part.

[2241] VGAM163 host target gene, herein designated VGAM HOST TARGET GENE, encodes a corresponding messenger RNA, VGAM163 host target RNA, herein designated VGAM HOST TARGET RNA. VGAM163 host target RNA, herein designated VGAM HOST TARGET RNA, comprises three regions, as is typical of mRNA of a protein coding gene: a 5 untranslated region, a protein coding region and a 3 untranslated region, designated 5UTR, PROTEIN CODING and 3UTR respectively.

[2242] VGAM163 RNA, herein designated VGAM RNA, binds complementarily to one or more host target binding sites located in untranslated regions of VGAM163 host target RNA, herein designated VGAM HOST TARGET RNA. This complementary binding is due to the fact that the nucleotide sequence of VGAM163 RNA, herein designated VGAM RNA, is an accurate or a partial inversed-reversed sequence of the nucleotide sequence of each of the host target binding sites. As an illustration, FIG. 1 shows 3 such host target binding sites, designated BINDING SITE I, BINDING SITE II and BINDING SITE III respectively. It is appreciated that the number of host target binding sites shown in FIG. 1 is meant as an illustration only, and is not meant to be limiting VGAM163 RNA, herein designated VGAM RNA, may have a different number of host target binding sites in untranslated regions of a VGAM163 host target RNA, herein designated VGAM HOST TARGET RNA. It is further appreciated that while FIG. 1 depicts host target binding sites in the 3UTR region, this is meant as an example only these host target binding sites may be located in the 3UTR region, the 5UTR region, or in both 3UTR and 5UTR regions.

[2243] The complementary binding of VGAM163 RNA, herein designated VGAM RNA, to host target binding sites on VGAM163 host target RNA, herein designated VGAM HOST TARGET RNA, such as BINDING SITE I, BINDING SITE II and BINDING SITE III, inhibits translation of VGAM163 host target RNA, herein designated VGAM HOST TARGET RNA, into VGAM163 host target protein, herein designated VGAM HOST TARGET PROTEIN. VGAM host target protein is therefore outlined by a broken line.

[2244] It is appreciated that VGAM163 host target gene, herein designated VGAM HOST TARGET GENE, in fact represents a plurality of VGAM163 host target genes. The mRNA of each one of this plurality of VGAM163 host target genes comprises one or more host target binding sites, each having a nucleotide sequence which is at least partly complementary to VGAM163 RNA, herein designated VGAM RNA, and which when bound by VGAM163 RNA, herein designated VGAM RNA, causes inhibition of translation of respective one or more VGAM163 host target proteins.

[2245] It is further appreciated by one skilled in the art that the mode of translational inhibition illustrated by FIG. 1 with specific reference to translational inhibition exerted by VGAM163 gene, herein designated VGAM GENE, on one or more VGAM163 host target gene, herein designated VGAM HOST TARGET GENE, is in fact common to other known non-viral miRNA genes. As mentioned hereinabove with reference to the background section, although a specific complementary binding site has been demonstrated only for some of the known miRNA genes (primarily Lin-4 and Let-7), all other recently discovered miRNA genes are also believed by those skilled in the art to modulate expression of other genes by complementary binding, although specific complementary binding sites of these other miRNA genes have not yet been found (Ruvkun G., Perspective: Glimpses of a tiny RNA world, Science 294, 779 (2001)).

[2246] It is yet further appreciated that a function of VGAM163 is inhibition of expression of host target genes, as part of a novel viral mechanism of attacking a host. Accordingly, utilities of VGAM163 include diagnosis, prevention and treatment of viral infection by Vaccinia virus. Specific functions, and accordingly utilities, of VGAM163 correlate with, and may be deduced from, the identity of the host target genes which VGAM163 binds and inhibits, and the function of these host target genes, as elaborated hereinbelow.

[2247] Nucleotide sequences of the VGAM163 precursor RNA, herein designated VGAM PRECURSOR RNA, and of the diced VGAM163 RNA, herein designated VGAM RNA, and a schematic representation of the secondary folding of VGAM163 folded precursor RNA, herein designated VGAM FOLDED PRECURSOR RNA, of VGAM163 are further described hereinbelow with reference to Table 1.

[2248] Nucleotide sequences of host target binding sites, such as BINDING SITE-I, BINDING SITE-II and BINDING SITE-III of FIG. 1, found on, and schematic representation of the complementarity of each of these host target binding sites to VGAM163 RNA, herein designated VGAM RNA, are described hereinbelow with reference to Table 2.

[2249] FIG. 1 further provides a conceptual description of another novel bioinformatically detected viral gene of the present invention, referred to here as Viral Genomic Address Messenger 164 (VGAM164) viral gene, which modulates expression of respective host target genes thereof, the function and utility of which host target genes is known in the art.

[2250] VGAM164 is a novel bioinformatically detected regulatory, non protein coding, viral micro RNA (miRNA) gene. The method by which VGAM164 was detected is described hereinabove with reference to FIGS. 2-8.

[2251] VGAM164 gene, herein designated VGAM GENE, is a viral gene contained in the genome of Vaccinia virus. VGAM164 host target gene, herein designated VGAM HOST TARGET GENE, is a human gene contained in the human genome.

[2252] VGAM164 gene, herein designated VGAM GENE, encodes a VGAM164 precursor RNA, herein designated VGAM PRECURSOR RNA. Similar to other miRNA genes, and unlike most ordinary genes, VGAM164 precursor RNA, herein designated VGAM PRECURSOR RNA, does not encode a protein. A nucleotide sequence identical or highly similar to the nucleotide sequence of VGAM164 precursor RNA is designated SEQ ID:150, and is provided hereinbelow with reference to the sequence listing part. Nucleotide sequence SEQ ID:150 is located at position 84375 relative to the genome of Vaccinia virus.

[2253] VGAM164 precursor RNA, herein designated VGAM PRECURSOR RNA, folds onto itself, forming VGAM164 folded precursor RNA, herein designated VGAM FOLDED PRECURSOR RNA, which has a two-dimensional hairpin structure. As is well known in the art, this hairpin structure, is typical of RNA encoded by miRNA genes, and is due to the fact that the nucleotide sequence of the first half of the RNA encoded by a miRNA gene is an accurate or partial inversed-reversed sequence of the nucleotide sequence of the second half thereof.

[2254] An enzyme complex designated DICER COMPLEX, dices the VGAM164 folded precursor RNA, herein designated VGAM FOLDED PRECURSOR RNA, into VGAM164 RNA, herein designated VGAM RNA, a single stranded ˜22 nt long RNA segment. As is known in the art, dicing of a hairpin structured RNA precursor product into a short ˜22 nt RNA segment is catalyzed by an enzyme complex comprising an enzyme called Dicer together with other necessary proteins. A probable (over 73%) nucleotide sequence of VGAM164 RNA is designated SEQ ID:499, and is provided hereinbelow with reference to the sequence listing part.

[2255] VGAM164 host target gene, herein designated VGAM HOST TARGET GENE, encodes a corresponding messenger RNA, VGAM164 host target RNA, herein designated VGAM HOST TARGET RNA. VGAM164 host target RNA, herein designated VGAM HOST TARGET RNA, comprises three regions, as is typical of mRNA of a protein coding gene: a 5 untranslated region, a protein coding region and a 3 untranslated region, designated 5UTR, PROTEIN CODING and 3UTR respectively.

[2256] VGAM164 RNA, herein designated VGAM RNA, binds complementarily to one or more host target binding sites located in untranslated regions of VGAM164 host target RNA, herein designated VGAM HOST TARGET RNA. This complementary binding is due to the fact that the nucleotide sequence of VGAM164 RNA, herein designated VGAM RNA, is an accurate or a partial inversed-reversed sequence of the nucleotide sequence of each of the host target binding sites. As an illustration, FIG. 1 shows 3 such host target binding sites, designated BINDING SITE I, BINDING SITE II and BINDING SITE III respectively. It is appreciated that the number of host target binding sites shown in FIG. 1 is meant as an illustration only, and is not meant to be limiting VGAM164 RNA, herein designated VGAM RNA, may have a different number of host target binding sites in untranslated regions of a VGAM164 host target RNA, herein designated VGAM HOST TARGET RNA. It is further appreciated that while FIG. 1 depicts host target binding sites in the 3UTR region, this is meant as an example only these host target binding sites may be located in the 3UTR region, the 5UTR region, or in both 3UTR and 5UTR regions.

[2257] The complementary binding of VGAM164 RNA, herein designated VGAM RNA, to host target binding sites on VGAM164 host target RNA, herein designated VGAM HOST TARGET RNA, such as BINDING SITE I, BINDING SITE II and BINDING SITE III, inhibits translation of VGAM164 host target RNA, herein designated VGAM HOST TARGET RNA, into VGAM164 host target protein, herein designated VGAM HOST TARGET PROTEIN. VGAM host target protein is therefore outlined by a broken line.

[2258] It is appreciated that VGAM164 host target gene, herein designated VGAM HOST TARGET GENE, in fact represents a plurality of VGAM164 host target genes. The mRNA of each one of this plurality of VGAM164 host target genes comprises one or more host target binding sites, each having a nucleotide sequence which is at least partly complementary to VGAM164 RNA, herein designated VGAM RNA, and which when bound by VGAM164 RNA, herein designated VGAM RNA, causes inhibition of translation of respective one or more VGAM164 host target proteins.

[2259] It is further appreciated by one skilled in the art that the mode of translational inhibition illustrated by FIG. 1 with specific reference to translational inhibition exerted by VGAM164 gene, herein designated VGAM GENE, on one or more VGAM164 host target gene, herein designated VGAM HOST TARGET GENE, is in fact common to other known non-viral miRNA genes. As mentioned hereinabove with reference to the background section, although a specific complementary binding site has been demonstrated only for some of the known miRNA genes (primarily Lin-4 and Let-7), all other recently discovered miRNA genes are also believed by those skilled in the art to modulate expression of other genes by complementary binding, although specific complementary binding sites of these other miRNA genes have not yet been found (Ruvkun G., Perspective: Glimpses of a tiny RNA world, Science 294, 779 (2001)).

[2260] It is yet further appreciated that a function of VGAM164 is inhibition of expression of host target genes, as part of a novel viral mechanism of attacking a host. Accordingly, utilities of VGAM164 include diagnosis, prevention and treatment of viral infection by Vaccinia virus. Specific functions, and accordingly utilities, of VGAM164 correlate with, and may be deduced from, the identity of the host target genes which VGAM164 binds and inhibits, and the function of these host target genes, as elaborated hereinbelow.

[2261] Nucleotide sequences of the VGAM164 precursor RNA, herein designated VGAM PRECURSOR RNA, and of the diced VGAM164 RNA, herein designated VGAM RNA, and a schematic representation of the secondary folding of VGAM164 folded precursor RNA, herein designated VGAM FOLDED PRECURSOR RNA, of VGAM164 are further described hereinbelow with reference to Table 1.

[2262] Nucleotide sequences of host target binding sites, such as BINDING SITE-I, BINDING SITE-II and BINDING SITE-III of FIG. 1, found on, and schematic representation of the complementarity of each of these host target binding sites to VGAM164 RNA, herein designated VGAM RNA, are described hereinbelow with reference to Table 2.

[2263] FIG. 1 further provides a conceptual description of another novel bioinformatically detected viral gene of the present invention, referred to here as Viral Genomic Address Messenger 165 (VGAM165) viral gene, which modulates expression of respective host target genes thereof, the function and utility of which host target genes is known in the art.

[2264] VGAM165 is a novel bioinformatically detected regulatory, non protein coding, viral micro RNA (miRNA) gene. The method by which VGAM165 was detected is described hereinabove with reference to FIGS. 2-8.

[2265] VGAM165 gene, herein designated VGAM GENE, is a viral gene contained in the genome of Vaccinia virus. VGAM165 host target gene, herein designated VGAM HOST TARGET GENE, is a human gene contained in the human genome.

[2266] VGAM165 gene, herein designated VGAM GENE, encodes a VGAM165 precursor RNA, herein designated VGAM PRECURSOR RNA. Similar to other miRNA genes, and unlike most ordinary genes, VGAM165 precursor RNA, herein designated VGAM PRECURSOR RNA, does not encode a protein. A nucleotide sequence identical or highly similar to the nucleotide sequence of VGAM165 precursor RNA is designated SEQ ID: 151, and is provided hereinbelow with reference to the sequence listing part. Nucleotide sequence SEQ ID:151 is located at position 84949 relative to the genome of Vaccinia virus.

[2267] VGAM165 precursor RNA, herein designated VGAM PRECURSOR RNA, folds onto itself, forming VGAM165 folded precursor RNA, herein designated VGAM FOLDED PRECURSOR RNA, which has a two-dimensional hairpin structure. As is well known in the art, this hairpin structure, is typical of RNA encoded by miRNA genes, and is due to the fact that the nucleotide sequence of the first half of the RNA encoded by a miRNA gene is an accurate or partial inversed-reversed sequence of the nucleotide sequence of the second half thereof.

[2268] An enzyme complex designated DICER COMPLEX, dices the VGAM165 folded precursor RNA, herein designated VGAM FOLDED PRECURSOR RNA, into VGAM165 RNA, herein designated VGAM RNA, a single stranded ˜22 nt long RNA segment. As is known in the art, dicing of a hairpin structured RNA precursor product into a short ˜22 nt RNA segment is catalyzed by an enzyme complex comprising an enzyme called Dicer together with other necessary proteins. A probable (over 92%) nucleotide sequence of VGAM165 RNA is designated SEQ ID:500, and is provided hereinbelow with reference to the sequence listing part.

[2269] VGAM165 host target gene, herein designated VGAM HOST TARGET GENE, encodes a corresponding messenger RNA, VGAM165 host target RNA, herein designated VGAM HOST TARGET RNA. VGAM165 host target RNA, herein designated VGAM HOST TARGET RNA, comprises three regions, as is typical of mRNA of a protein coding gene: a 5 untranslated region, a protein coding region and a 3 untranslated region, designated 5UTR, PROTEIN CODING and 3UTR respectively.

[2270] VGAM165 RNA, herein designated VGAM RNA, binds complementarily to one or more host target binding sites located in untranslated regions of VGAM165 host target RNA, herein designated VGAM HOST TARGET RNA. This complementary binding is due to the fact that the nucleotide sequence of VGAM165 RNA, herein designated VGAM RNA, is an accurate or a partial inversed-reversed sequence of the nucleotide sequence of each of the host target binding sites. As an illustration, FIG. 1 shows 3 such host target binding sites, designated BINDING SITE I, BINDING SITE II and BINDING SITE III respectively. It is appreciated that the number of host target binding sites shown in FIG. 1 is meant as an illustration only, and is not meant to be limiting VGAM165 RNA, herein designated VGAM RNA, may have a different number of host target binding sites in untranslated regions of a VGAM165 host target RNA, herein designated VGAM HOST TARGET RNA. It is further appreciated that while FIG. 1 depicts host target binding sites in the 3UTR region, this is meant as an example only these host target binding sites may be located in the 3UTR region, the 5UTR region, or in both 3UTR and 5UTR regions.

[2271] The complementary binding of VGAM165 RNA, herein designated VGAM RNA, to host target binding sites on VGAM165 host target RNA, herein designated VGAM HOST TARGET RNA, such as BINDING SITE I, BINDING SITE II and BINDING SITE III, inhibits translation of VGAM165 host target RNA, herein designated VGAM HOST TARGET RNA, into VGAM165 host target protein, herein designated VGAM HOST TARGET PROTEIN. VGAM host target protein is therefore outlined by a broken line.

[2272] It is appreciated that VGAM165 host target gene, herein designated VGAM HOST TARGET GENE, in fact represents a plurality of VGAM165 host target genes. The mRNA of each one of this plurality of VGAM165 host target genes comprises one or more host target binding sites, each having a nucleotide sequence which is at least partly complementary to VGAM165 RNA, herein designated VGAM RNA, and which when bound by VGAM165 RNA, herein designated VGAM RNA, causes inhibition of translation of respective one or more VGAM165 host target proteins.

[2273] It is further appreciated by one skilled in the art that the mode of translational inhibition illustrated by FIG. 1 with specific reference to translational inhibition exerted by VGAM165 gene, herein designated VGAM GENE, on one or more VGAM165 host target gene, herein designated VGAM HOST TARGET GENE, is in fact common to other known non-viral miRNA genes. As mentioned hereinabove with reference to the background section, although a specific complementary binding site has been demonstrated only for some of the known miRNA genes (primarily Lin-4 and Let-7), all other recently discovered miRNA genes are also believed by those skilled in the art to modulate expression of other genes by complementary binding, although specific complementary binding sites of these other miRNA genes have not yet been found (Ruvkun G., Perspective: Glimpses of a tiny RNA world, Science 294, 779 (2001)).

[2274] It is yet further appreciated that a function of VGAM165 is inhibition of expression of host target genes, as part of a novel viral mechanism of attacking a host. Accordingly, utilities of VGAM165 include diagnosis, prevention and treatment of viral infection by Vaccinia virus. Specific functions, and accordingly utilities, of VGAM165 correlate with, and may be deduced from, the identity of the host target genes which VGAM165 binds and inhibits, and the function of these host target genes, as elaborated hereinbelow.

[2275] Nucleotide sequences of the VGAM165 precursor RNA, herein designated VGAM PRECURSOR RNA, and of the diced VGAM165 RNA, herein designated VGAM RNA, and a schematic representation of the secondary folding of VGAM165 folded precursor RNA, herein designated VGAM FOLDED PRECURSOR RNA, of VGAM165 are further described hereinbelow with reference to Table 1.

[2276] Nucleotide sequences of host target binding sites, such as BINDING SITE-I, BINDING SITE-II and BINDING SITE-III of FIG. 1, found on, and schematic representation of the complementarity of each of these host target binding sites to VGAM165 RNA, herein designated VGAM RNA, are described hereinbelow with reference to Table 2.

[2277] FIG. 1 further provides a conceptual description of another novel bioinformatically detected viral gene of the present invention, referred to here as Viral Genomic Address Messenger 166 (VGAM166) viral gene, which modulates expression of respective host target genes thereof, the function and utility of which host target genes is known in the art.

[2278] VGAM166 is a novel bioinformatically detected regulatory, non protein coding, viral micro RNA (miRNA) gene. The method by which VGAM166 was detected is described hereinabove with reference to FIGS. 2-8.

[2279] VGAM166 gene, herein designated VGAM GENE, is a viral gene contained in the genome of Vaccinia virus. VGAM166 host target gene, herein designated VGAM HOST TARGET GENE, is a human gene contained in the human genome.

[2280] VGAM166 gene, herein designated VGAM GENE, encodes a VGAM166 precursor RNA, herein designated VGAM PRECURSOR RNA. Similar to other miRNA genes, and unlike most ordinary genes, VGAM166 precursor RNA, herein designated VGAM PRECURSOR RNA, does not encode a protein. A nucleotide sequence identical or highly similar to the nucleotide sequence of VGAM166 precursor RNA is designated SEQ ID:152, and is provided hereinbelow with reference to the sequence listing part. Nucleotide sequence SEQ ID:152 is located at position 83280 relative to the genome of Vaccinia virus.

[2281] VGAM166 precursor RNA, herein designated VGAM PRECURSOR RNA, folds onto itself, forming VGAM166 folded precursor RNA, herein designated VGAM FOLDED PRECURSOR RNA, which has a two-dimensional hairpin structure. As is well known in the art, this hairpin structure, is typical of RNA encoded by miRNA genes, and is due to the fact that the nucleotide sequence of the first half of the RNA encoded by a miRNA gene is an accurate or partial inversed-reversed sequence of the nucleotide sequence of the second half thereof.

[2282] An enzyme complex designated DICER COMPLEX, dices the VGAM166 folded precursor RNA, herein designated VGAM FOLDED PRECURSOR RNA, into VGAM166 RNA, herein designated VGAM RNA, a single stranded ˜22 nt long RNA segment. As is known in the art, dicing of a hairpin structured RNA precursor product into a short ˜22 nt RNA segment is catalyzed by an enzyme complex comprising an enzyme called Dicer together with other necessary proteins. A probable (over 85%) nucleotide sequence of VGAM166 RNA is designated SEQ ID:501, and is provided hereinbelow with reference to the sequence listing part.

[2283] VGAM166 host target gene, herein designated VGAM HOST TARGET GENE, encodes a corresponding messenger RNA, VGAM166 host target RNA, herein designated VGAM HOST TARGET RNA. VGAM166 host target RNA, herein designated VGAM HOST TARGET RNA, comprises three regions, as is typical of mRNA of a protein coding gene: a 5 untranslated region, a protein coding region and a 3 untranslated region, designated 5UTR, PROTEIN CODING and 3UTR respectively.

[2284] VGAM166 RNA, herein designated VGAM RNA, binds complementarily to one or more host target binding sites located in untranslated regions of VGAM166 host target RNA, herein designated VGAM HOST TARGET RNA. This complementary binding is due to the fact that the nucleotide sequence of VGAM166 RNA, herein designated VGAM RNA, is an accurate or a partial inversed-reversed sequence of the nucleotide sequence of each of the host target binding sites. As an illustration, FIG. 1 shows 3 such host target binding sites, designated BINDING SITE I, BINDING SITE II and BINDING SITE III respectively. It is appreciated that the number of host target binding sites shown in FIG. 1 is meant as an illustration only, and is not meant to be limiting VGAM166 RNA, herein designated VGAM RNA, may have a different number of host target binding sites in untranslated regions of a VGAM166 host target RNA, herein designated VGAM HOST TARGET RNA. It is further appreciated that while FIG. 1 depicts host target binding sites in the 3UTR region, this is meant as an example only these host target binding sites may be located in the 3UTR region, the 5UTR region, or in both 3UTR and 5UTR regions.

[2285] The complementary binding of VGAM166 RNA, herein designated VGAM RNA, to host target binding sites on VGAM166 host target RNA, herein designated VGAM HOST TARGET RNA, such as BINDING SITE I, BINDING SITE II and BINDING SITE III, inhibits translation of VGAM166 host target RNA, herein designated VGAM HOST TARGET RNA, into VGAM166 host target protein, herein designated VGAM HOST TARGET PROTEIN. VGAM host target protein is therefore outlined by a broken line.

[2286] It is appreciated that VGAM166 host target gene, herein designated VGAM HOST TARGET GENE, in fact represents a plurality of VGAM166 host target genes. The mRNA of each one of this plurality of VGAM166 host target genes comprises one or more host target binding sites, each having a nucleotide sequence which is at least partly complementary to VGAM166 RNA, herein designated VGAM RNA, and which when bound by VGAM166 RNA, herein designated VGAM RNA, causes inhibition of translation of respective one or more VGAM166 host target proteins.

[2287] It is further appreciated by one skilled in the art that the mode of translational inhibition illustrated by FIG. 1 with specific reference to translational inhibition exerted by VGAM166 gene, herein designated VGAM GENE, on one or more VGAM166 host target gene, herein designated VGAM HOST TARGET GENE, is in fact common to other known non-viral miRNA genes. As mentioned hereinabove with reference to the background section, although a specific complementary binding site has been demonstrated only for some of the known miRNA genes (primarily Lin-4 and Let-7), all other recently discovered miRNA genes are also believed by those skilled in the art to modulate expression of other genes by complementary binding, although specific complementary binding sites of these other miRNA genes have not yet been found (Ruvkun G., Perspective: Glimpses of a tiny RNA world, Science 294, 779 (2001)).

[2288] It is yet further appreciated that a function of VGAM166 is inhibition of expression of host target genes, as part of a novel viral mechanism of attacking a host. Accordingly, utilities of VGAM166 include diagnosis, prevention and treatment of viral infection by Vaccinia virus. Specific functions, and accordingly utilities, of VGAM166 correlate with, and may be deduced from, the identity of the host target genes which VGAM166 binds and inhibits, and the function of these host target genes, as elaborated hereinbelow.

[2289] Nucleotide sequences of the VGAM166 precursor RNA, herein designated VGAM PRECURSOR RNA, and of the diced VGAM166 RNA, herein designated VGAM RNA, and a schematic representation of the secondary folding of VGAM166 folded precursor RNA, herein designated VGAM FOLDED PRECURSOR RNA, of VGAM166 are further described hereinbelow with reference to Table 1.

[2290] Nucleotide sequences of host target binding sites, such as BINDING SITE-I, BINDING SITE-II and BINDING SITE-III of FIG. 1, found on, and schematic representation of the complementarity of each of these host target binding sites to VGAM166 RNA, herein designated VGAM RNA, are described hereinbelow with reference to Table 2.

[2291] FIG. 1 further provides a conceptual description of another novel bioinformatically detected viral gene of the present invention, referred to here as Viral Genomic Address Messenger 167 (VGAM167) viral gene, which modulates expression of respective host target genes thereof, the function and utility of which host target genes is known in the art.

[2292] VGAM167 is a novel bioinformatically detected regulatory, non protein coding, viral micro RNA (miRNA) gene. The method by which VGAM167 was detected is described hereinabove with reference to FIGS. 2-8.

[2293] VGAM167 gene, herein designated VGAM GENE, is a viral gene contained in the genome of Vaccinia virus. VGAM167 host target gene, herein designated VGAM HOST TARGET GENE, is a human gene contained in the human genome.

[2294] VGAM167 gene, herein designated VGAM GENE, encodes a VGAM167 precursor RNA, herein designated VGAM PRECURSOR RNA. Similar to other miRNA genes, and unlike most ordinary genes, VGAM167 precursor RNA, herein designated VGAM PRECURSOR RNA, does not encode a protein. A nucleotide sequence identical or highly similar to the nucleotide sequence of VGAM167 precursor RNA is designated SEQ ID:153, and is provided hereinbelow with reference to the sequence listing part. Nucleotide sequence SEQ ID:153 is located at position 85141 relative to the genome of Vaccinia virus.

[2295] VGAM167 precursor RNA, herein designated VGAM PRECURSOR RNA, folds onto itself, forming VGAM167 folded precursor RNA, herein designated VGAM FOLDED PRECURSOR RNA, which has a two-dimensional hairpin structure. As is well known in the art, this hairpin structure, is typical of RNA encoded by miRNA genes, and is due to the fact that the nucleotide sequence of the first half of the RNA encoded by a miRNA gene is an accurate or partial inversed-reversed sequence of the nucleotide sequence of the second half thereof.

[2296] An enzyme complex designated DICER COMPLEX, dices the VGAM167 folded precursor RNA, herein designated VGAM FOLDED PRECURSOR RNA, into VGAM167 RNA, herein designated VGAM RNA, a single stranded ˜22 nt long RNA segment. As is known in the art, dicing of a hairpin structured RNA precursor product into a short ˜22 nt RNA segment is catalyzed by an enzyme complex comprising an enzyme called Dicer together with other necessary proteins. A probable (over 92%) nucleotide sequence of VGAM167 RNA is designated SEQ ID:502, and is provided hereinbelow with reference to the sequence listing part.

[2297] VGAM167 host target gene, herein designated VGAM HOST TARGET GENE, encodes a corresponding messenger RNA, VGAM167 host target RNA, herein designated VGAM HOST TARGET RNA. VGAM167 host target RNA, herein designated VGAM HOST TARGET RNA, comprises three regions, as is typical of mRNA of a protein coding gene: a 5 untranslated region, a protein coding region and a 3 untranslated region, designated 5UTR, PROTEIN CODING and 3UTR respectively.

[2298] VGAM167 RNA, herein designated VGAM RNA, binds complementarily to one or more host target binding sites located in untranslated regions of VGAM167 host target RNA, herein designated VGAM HOST TARGET RNA. This complementary binding is due to the fact that the nucleotide sequence of VGAM167 RNA, herein designated VGAM RNA, is an accurate or a partial inversed-reversed sequence of the nucleotide sequence of each of the host target binding sites. As an illustration, FIG. 1 shows 3 such host target binding sites, designated BINDING SITE I, BINDING SITE II and BINDING SITE III respectively. It is appreciated that the number of host target binding sites shown in FIG. 1 is meant as an illustration only, and is not meant to be limiting VGAM167 RNA, herein designated VGAM RNA, may have a different number of host target binding sites in untranslated regions of a VGAM167 host target RNA, herein designated VGAM HOST TARGET RNA. It is further appreciated that while FIG. 1 depicts host target binding sites in the 3UTR region, this is meant as an example only these host target binding sites may be located in the 3UTR region, the 5UTR region, or in both 3UTR and 5UTR regions.

[2299] The complementary binding of VGAM167 RNA, herein designated VGAM RNA, to host target binding sites on VGAM167 host target RNA, herein designated VGAM HOST TARGET RNA, such as BINDING SITE I, BINDING SITE II and BINDING SITE III, inhibits translation of VGAM167 host target RNA, herein designated VGAM HOST TARGET RNA, into VGAM167 host target protein, herein designated VGAM HOST TARGET PROTEIN. VGAM host target protein is therefore outlined by a broken line.

[2300] It is appreciated that VGAM167 host target gene, herein designated VGAM HOST TARGET GENE, in fact represents a plurality of VGAM167 host target genes. The mRNA of each one of this plurality of VGAM167 host target genes comprises one or more host target binding sites, each having a nucleotide sequence which is at least partly complementary to VGAM167 RNA, herein designated VGAM RNA, and which when bound by VGAM167 RNA, herein designated VGAM RNA, causes inhibition of translation of respective one or more VGAM167 host target proteins.

[2301] It is further appreciated by one skilled in the art that the mode of translational inhibition illustrated by FIG. 1 with specific reference to translational inhibition exerted by VGAM167 gene, herein designated VGAM GENE, on one or more VGAM167 host target gene, herein designated VGAM HOST TARGET GENE, is in fact common to other known non-viral miRNA genes. As mentioned hereinabove with reference to the background section, although a specific complementary binding site has been demonstrated only for some of the known miRNA genes (primarily Lin-4 and Let-7), all other recently discovered miRNA genes are also believed by those skilled in the art to modulate expression of other genes by complementary binding, although specific complementary binding sites of these other miRNA genes have not yet been found (Ruvkun G., Perspective: Glimpses of a tiny RNA world, Science 294, 779 (2001)).

[2302] It is yet further appreciated that a function of VGAM167 is inhibition of expression of host target genes, as part of a novel viral mechanism of attacking a host. Accordingly, utilities of VGAM167 include diagnosis, prevention and treatment of viral infection by Vaccinia virus. Specific functions, and accordingly utilities, of VGAM167 correlate with, and may be deduced from, the identity of the host target genes which VGAM167 binds and inhibits, and the function of these host target genes, as elaborated hereinbelow.

[2303] Nucleotide sequences of the VGAM167 precursor RNA, herein designated VGAM PRECURSOR RNA, and of the diced VGAM167 RNA, herein designated VGAM RNA, and a schematic representation of the secondary folding of VGAM167 folded precursor RNA, herein designated VGAM FOLDED PRECURSOR RNA, of VGAM167 are further described hereinbelow with reference to Table 1.

[2304] Nucleotide sequences of host target binding sites, such as BINDING SITE-I, BINDING SITE-II and BINDING SITE-III of FIG. 1, found on, and schematic representation of the complementarity of each of these host target binding sites to VGAM167 RNA, herein designated VGAM RNA, are described hereinbelow with reference to Table 2.

[2305] FIG. 1 further provides a conceptual description of another novel bioinformatically detected viral gene of the present invention, referred to here as Viral Genomic Address Messenger 168 (VGAM168) viral gene, which modulates expression of respective host target genes thereof, the function and utility of which host target genes is known in the art.

[2306] VGAM168 is a novel bioinformatically detected regulatory, non protein coding, viral micro RNA (miRNA) gene. The method by which VGAM168 was detected is described hereinabove with reference to FIGS. 2-8.

[2307] VGAM168 gene, herein designated VGAM GENE, is a viral gene contained in the genome of Vaccinia virus. VGAM168 host target gene, herein designated VGAM HOST TARGET GENE, is a human gene contained in the human genome.

[2308] VGAM168 gene, herein designated VGAM GENE, encodes a VGAM168 precursor RNA, herein designated VGAM PRECURSOR RNA. Similar to other miRNA genes, and unlike most ordinary genes, VGAM168 precursor RNA, herein designated VGAM PRECURSOR RNA, does not encode a protein. A nucleotide sequence identical or highly similar to the nucleotide sequence of VGAM168 precursor RNA is designated SEQ ID:154, and is provided hereinbelow with reference to the sequence listing part. Nucleotide sequence SEQ ID:154 is located at position 83136 relative to the genome of Vaccinia virus.

[2309] VGAM168 precursor RNA, herein designated VGAM PRECURSOR RNA, folds onto itself, forming VGAM168 folded precursor RNA, herein designated VGAM FOLDED PRECURSOR RNA, which has a two-dimensional hairpin structure. As is well known in the art, this hairpin structure, is typical of RNA encoded by miRNA genes, and is due to the fact that the nucleotide sequence of the first half of the RNA encoded by a miRNA gene is an accurate or partial inversed-reversed sequence of the nucleotide sequence of the second half thereof.

[2310] An enzyme complex designated DICER COMPLEX, dices the VGAM168 folded precursor RNA, herein designated VGAM FOLDED PRECURSOR RNA, into VGAM168 RNA, herein designated VGAM RNA, a single stranded ˜22 nt long RNA segment. As is known in the art, dicing of a hairpin structured RNA precursor product into a short ˜22 nt RNA segment is catalyzed by an enzyme complex comprising an enzyme called Dicer together with other necessary proteins. A probable (over 70%) nucleotide sequence of VGAM168 RNA is designated SEQ ID:503, and is provided hereinbelow with reference to the sequence listing part.

[2311] VGAM168 host target gene, herein designated VGAM HOST TARGET GENE, encodes a corresponding messenger RNA, VGAM168 host target RNA, herein designated VGAM HOST TARGET RNA. VGAM168 host target RNA, herein designated VGAM HOST TARGET RNA, comprises three regions, as is typical of mRNA of a protein coding gene: a 5 untranslated region, a protein coding region and a 3 untranslated region, designated 5UTR, PROTEIN CODING and 3UTR respectively.

[2312] VGAM168 RNA, herein designated VGAM RNA, binds complementarily to one or more host target binding sites located in untranslated regions of VGAM168 host target RNA, herein designated VGAM HOST TARGET RNA. This complementary binding is due to the fact that the nucleotide sequence of VGAM168 RNA, herein designated VGAM RNA, is an accurate or a partial inversed-reversed sequence of the nucleotide sequence of each of the host target binding sites. As an illustration, FIG. 1 shows 3 such host target binding sites, designated BINDING SITE I, BINDING SITE II and BINDING SITE III respectively. It is appreciated that the number of host target binding sites shown in FIG. 1 is meant as an illustration only, and is not meant to be limiting VGAM168 RNA, herein designated VGAM RNA, may have a different number of host target binding sites in untranslated regions of a VGAM168 host target RNA, herein designated VGAM HOST TARGET RNA. It is further appreciated that while FIG. 1 depicts host target binding sites in the 3UTR region, this is meant as an example only these host target binding sites may be located in the 3UTR region, the 5UTR region, or in both 3UTR and 5UTR regions.

[2313] The complementary binding of VGAM168 RNA, herein designated VGAM RNA, to host target binding sites on VGAM168 host target RNA, herein designated VGAM HOST TARGET RNA, such as BINDING SITE I, BINDING SITE II and BINDING SITE III, inhibits translation of VGAM168 host target RNA, herein designated VGAM HOST TARGET RNA, into VGAM168 host target protein, herein designated VGAM HOST TARGET PROTEIN. VGAM host target protein is therefore outlined by a broken line.

[2314] It is appreciated that VGAM168 host target gene, herein designated VGAM HOST TARGET GENE, in fact represents a plurality of VGAM168 host target genes. The mRNA of each one of this plurality of VGAM168 host target genes comprises one or more host target binding sites, each having a nucleotide sequence which is at least partly complementary to VGAM168 RNA, herein designated VGAM RNA, and which when bound by VGAM168 RNA, herein designated VGAM RNA, causes inhibition of translation of respective one or more VGAM168 host target proteins.

[2315] It is further appreciated by one skilled in the art that the mode of translational inhibition illustrated by FIG. 1 with specific reference to translational inhibition exerted by VGAM168 gene, herein designated VGAM GENE, on one or more VGAM168 host target gene, herein designated VGAM HOST TARGET GENE, is in fact common to other known non-viral miRNA genes. As mentioned hereinabove with reference to the background section, although a specific complementary binding site has been demonstrated only for some of the known miRNA genes (primarily Lin-4 and Let-7), all other recently discovered miRNA genes are also believed by those skilled in the art to modulate expression of other genes by complementary binding, although specific complementary binding sites of these other miRNA genes have not yet been found (Ruvkun G., Perspective: Glimpses of a tiny RNA world, Science 294, 779 (2001)).

[2316] It is yet further appreciated that a function of VGAM168 is inhibition of expression of host target genes, as part of a novel viral mechanism of attacking a host. Accordingly, utilities of VGAM168 include diagnosis, prevention and treatment of viral infection by Vaccinia virus. Specific functions, and accordingly utilities, of VGAM168 correlate with, and may be deduced from, the identity of the host target genes which VGAM168 binds and inhibits, and the function of these host target genes, as elaborated hereinbelow.

[2317] Nucleotide sequences of the VGAM168 precursor RNA, herein designated VGAM PRECURSOR RNA, and of the diced VGAM168 RNA, herein designated VGAM RNA, and a schematic representation of the secondary folding of VGAM168 folded precursor RNA, herein designated VGAM FOLDED PRECURSOR RNA, of VGAM168 are further described hereinbelow with reference to Table 1.

[2318] Nucleotide sequences of host target binding sites, such as BINDING SITE-I, BINDING SITE-II and BINDING SITE-III of FIG. 1, found on, and schematic representation of the complementarity of each of these host target binding sites to VGAM168 RNA, herein designated VGAM RNA, are described hereinbelow with reference to Table 2.

[2319] FIG. 1 further provides a conceptual description of another novel bioinformatically detected viral gene of the present invention, referred to here as Viral Genomic Address Messenger 169 (VGAM169) viral gene, which modulates expression of respective host target genes thereof, the function and utility of which host target genes is known in the art.

[2320] VGAM169 is a novel bioinformatically detected regulatory, non protein coding, viral micro RNA (miRNA) gene. The method by which VGAM169 was detected is described hereinabove with reference to FIGS. 2-8.

[2321] VGAM169 gene, herein designated VGAM GENE, is a viral gene contained in the genome of Vaccinia virus. VGAM169 host target gene, herein designated VGAM HOST TARGET GENE, is a human gene contained in the human genome.

[2322] VGAM169 gene, herein designated VGAM GENE, encodes a VGAM169 precursor RNA, herein designated VGAM PRECURSOR RNA. Similar to other miRNA genes, and unlike most ordinary genes, VGAM169 precursor RNA, herein designated VGAM PRECURSOR RNA, does not encode a protein. A nucleotide sequence identical or highly similar to the nucleotide sequence of VGAM169 precursor RNA is designated SEQ ID:155, and is provided hereinbelow with reference to the sequence listing part. Nucleotide sequence SEQ ID:155 is located at position 87488 relative to the genome of Vaccinia virus.

[2323] VGAM169 precursor RNA, herein designated VGAM PRECURSOR RNA, folds onto itself, forming VGAM169 folded precursor RNA, herein designated VGAM FOLDED PRECURSOR RNA, which has a two-dimensional hairpin structure. As is well known in the art, this hairpin structure, is typical of RNA encoded by miRNA genes, and is due to the fact that the nucleotide sequence of the first half of the RNA encoded by a miRNA gene is an accurate or partial inversed-reversed sequence of the nucleotide sequence of the second half thereof.

[2324] An enzyme complex designated DICER COMPLEX, dices the VGAM169 folded precursor RNA, herein designated VGAM FOLDED PRECURSOR RNA, into VGAM169 RNA, herein designated VGAM RNA, a single stranded ˜22 nt long RNA segment. As is known in the art, dicing of a hairpin structured RNA precursor product into a short ˜22 nt RNA segment is catalyzed by an enzyme complex comprising an enzyme called Dicer together with other necessary proteins. A probable (over 87%) nucleotide sequence of VGAM169 RNA is designated SEQ ID:504, and is provided hereinbelow with reference to the sequence listing part.

[2325] VGAM169 host target gene, herein designated VGAM HOST TARGET GENE, encodes a corresponding messenger RNA, VGAM169 host target RNA, herein designated VGAM HOST TARGET RNA. VGAM169 host target RNA, herein designated VGAM HOST TARGET RNA, comprises three regions, as is typical of mRNA of a protein coding gene: a 5 untranslated region, a protein coding region and a 3 untranslated region, designated 5UTR, PROTEIN CODING and 3UTR respectively.

[2326] VGAM169 RNA, herein designated VGAM RNA, binds complementarily to one or more host target binding sites located in untranslated regions of VGAM169 host target RNA, herein designated VGAM HOST TARGET RNA. This complementary binding is due to the fact that the nucleotide sequence of VGAM169 RNA, herein designated VGAM RNA, is an accurate or a partial inversed-reversed sequence of the nucleotide sequence of each of the host target binding sites. As an illustration, FIG. 1 shows 3 such host target binding sites, designated BINDING SITE I, BINDING SITE II and BINDING SITE III respectively. It is appreciated that the number of host target binding sites shown in FIG. 1 is meant as an illustration only, and is not meant to be limiting VGAM169 RNA, herein designated VGAM RNA, may have a different number of host target binding sites in untranslated regions of a VGAM169 host target RNA, herein designated VGAM HOST TARGET RNA. It is further appreciated that while FIG. 1 depicts host target binding sites in the 3UTR region, this is meant as an example only these host target binding sites may be located in the 3UTR region, the 5UTR region, or in both 3UTR and 5UTR regions.

[2327] The complementary binding of VGAM169 RNA, herein designated VGAM RNA, to host target binding sites on VGAM169 host target RNA, herein designated VGAM HOST TARGET RNA, such as BINDING SITE I, BINDING SITE II and BINDING SITE III, inhibits translation of VGAM169 host target RNA, herein designated VGAM HOST TARGET RNA, into VGAM169 host target protein, herein designated VGAM HOST TARGET PROTEIN. VGAM host target protein is therefore outlined by a broken line.

[2328] It is appreciated that VGAM169 host target gene, herein designated VGAM HOST TARGET GENE, in fact represents a plurality of VGAM169 host target genes. The mRNA of each one of this plurality of VGAM169 host target genes comprises one or more host target binding sites, each having a nucleotide sequence which is at least partly complementary to VGAM169 RNA, herein designated VGAM RNA, and which when bound by VGAM169 RNA, herein designated VGAM RNA, causes inhibition of translation of respective one or more VGAM169 host target proteins.

[2329] It is further appreciated by one skilled in the art that the mode of translational inhibition illustrated by FIG. 1 with specific reference to translational inhibition exerted by VGAM169 gene, herein designated VGAM GENE, on one or more VGAM169 host target gene, herein designated VGAM HOST TARGET GENE, is in fact common to other known non-viral miRNA genes. As mentioned hereinabove with reference to the background section, although a specific complementary binding site has been demonstrated only for some of the known miRNA genes (primarily Lin-4 and Let-7), all other recently discovered miRNA genes are also believed by those skilled in the art to modulate expression of other genes by complementary binding, although specific complementary binding sites of these other miRNA genes have not yet been found (Ruvkun G., Perspective: Glimpses of a tiny RNA world, Science 294, 779 (2001)).

[2330] It is yet further appreciated that a function of VGAM169 is inhibition of expression of host target genes, as part of a novel viral mechanism of attacking a host. Accordingly, utilities of VGAM169 include diagnosis, prevention and treatment of viral infection by Vaccinia virus. Specific functions, and accordingly utilities, of VGAM169 correlate with, and may be deduced from, the identity of the host target genes which VGAM169 binds and inhibits, and the function of these host target genes, as elaborated hereinbelow.

[2331] Nucleotide sequences of the VGAM169 precursor RNA, herein designated VGAM PRECURSOR RNA, and of the diced VGAM169 RNA, herein designated VGAM RNA, and a schematic representation of the secondary folding of VGAM169 folded precursor RNA, herein designated VGAM FOLDED PRECURSOR RNA, of VGAM169 are further described hereinbelow with reference to Table 1.

[2332] Nucleotide sequences of host target binding sites, such as BINDING SITE-I, BINDING SITE-II and BINDING SITE-III of FIG. 1, found on, and schematic representation of the complementarity of each of these host target binding sites to VGAM169 RNA, herein designated VGAM RNA, are described hereinbelow with reference to Table 2.

[2333] FIG. 1 further provides a conceptual description of another novel bioinformatically detected viral gene of the present invention, referred to here as Viral Genomic Address Messenger 170 (VGAM170) viral gene, which modulates expression of respective host target genes thereof, the function and utility of which host target genes is known in the art.

[2334] VGAM170 is a novel bioinformatically detected regulatory, non protein coding, viral micro RNA (miRNA) gene. The method by which VGAM170 was detected is described hereinabove with reference to FIGS. 2-8.

[2335] VGAM170 gene, herein designated VGAM GENE, is a viral gene contained in the genome of Vaccinia virus. VGAM170 host target gene, herein designated VGAM HOST TARGET GENE, is a human gene contained in the human genome.

[2336] VGAM170 gene, herein designated VGAM GENE, encodes a VGAM170 precursor RNA, herein designated VGAM PRECURSOR RNA. Similar to other miRNA genes, and unlike most ordinary genes, VGAM170 precursor RNA, herein designated VGAM PRECURSOR RNA, does not encode a protein. A nucleotide sequence identical or highly similar to the nucleotide sequence of VGAM170 precursor RNA is designated SEQ ID:156, and is provided hereinbelow with reference to the sequence listing part. Nucleotide sequence SEQ ID:156 is located at position 88940 relative to the genome of Vaccinia virus.

[2337] VGAM170 precursor RNA, herein designated VGAM PRECURSOR RNA, folds onto itself, forming VGAM170 folded precursor RNA, herein designated VGAM FOLDED PRECURSOR RNA, which has a two-dimensional hairpin structure. As is well known in the art, this hairpin structure, is typical of RNA encoded by miRNA genes, and is due to the fact that the nucleotide sequence of the first half of the RNA encoded by a miRNA gene is an accurate or partial inversed-reversed sequence of the nucleotide sequence of the second half thereof.

[2338] An enzyme complex designated DICER COMPLEX, dices the VGAM170 folded precursor RNA, herein designated VGAM FOLDED PRECURSOR RNA, into VGAM170 RNA, herein designated VGAM RNA, a single stranded ˜22 nt long RNA segment. As is known in the art, dicing of a hairpin structured RNA precursor product into a short ˜22 nt RNA segment is catalyzed by an enzyme complex comprising an enzyme called Dicer together with other necessary proteins. A probable (over 79%) nucleotide sequence of VGAM170 RNA is designated SEQ ID:505, and is provided hereinbelow with reference to the sequence listing part.

[2339] VGAM170 host target gene, herein designated VGAM HOST TARGET GENE, encodes a corresponding messenger RNA, VGAM170 host target RNA, herein designated VGAM HOST TARGET RNA. VGAM170 host target RNA, herein designated VGAM HOST TARGET RNA, comprises three regions, as is typical of mRNA of a protein coding gene: a 5 untranslated region, a protein coding region and a 3 untranslated region, designated 5UTR, PROTEIN CODING and 3UTR respectively.

[2340] VGAM170 RNA, herein designated VGAM RNA, binds complementarily to one or more host target binding sites located in untranslated regions of VGAM170 host target RNA, herein designated VGAM HOST TARGET RNA. This complementary binding is due to the fact that the nucleotide sequence of VGAM170 RNA, herein designated VGAM RNA, is an accurate or a partial inversed-reversed sequence of the nucleotide sequence of each of the host target binding sites. As an illustration, FIG. 1 shows 3 such host target binding sites, designated BINDING SITE I, BINDING SITE II and BINDING SITE III respectively. It is appreciated that the number of host target binding sites shown in FIG. 1 is meant as an illustration only, and is not meant to be limiting VGAM170 RNA, herein designated VGAM RNA, may have a different number of host target binding sites in untranslated regions of a VGAM170 host target RNA, herein designated VGAM HOST TARGET RNA. It is further appreciated that while FIG. 1 depicts host target binding sites in the 3UTR region, this is meant as an example only these host target binding sites may be located in the 3UTR region, the 5UTR region, or in both 3UTR and 5UTR regions.

[2341] The complementary binding of VGAM170 RNA, herein designated VGAM RNA, to host target binding sites on VGAM170 host target RNA, herein designated VGAM HOST TARGET RNA, such as BINDING SITE I, BINDING SITE II and BINDING SITE III, inhibits translation of VGAM170 host target RNA, herein designated VGAM HOST TARGET RNA, into VGAM170 host target protein, herein designated VGAM HOST TARGET PROTEIN. VGAM host target protein is therefore outlined by a broken line.

[2342] It is appreciated that VGAM170 host target gene, herein designated VGAM HOST TARGET GENE, in fact represents a plurality of VGAM170 host target genes. The mRNA of each one of this plurality of VGAM170 host target genes comprises one or more host target binding sites, each having a nucleotide sequence which is at least partly complementary to VGAM170 RNA, herein designated VGAM RNA, and which when bound by VGAM170 RNA, herein designated VGAM RNA, causes inhibition of translation of respective one or more VGAM170 host target proteins.

[2343] It is further appreciated by one skilled in the art that the mode of translational inhibition illustrated by FIG. 1 with specific reference to translational inhibition exerted by VGAM170 gene, herein designated VGAM GENE, on one or more VGAM170 host target gene, herein designated VGAM HOST TARGET GENE, is in fact common to other known non-viral miRNA genes. As mentioned hereinabove with reference to the background section, although a specific complementary binding site has been demonstrated only for some of the known miRNA genes (primarily Lin-4 and Let-7), all other recently discovered miRNA genes are also believed by those skilled in the art to modulate expression of other genes by complementary binding, although specific complementary binding sites of these other miRNA genes have not yet been found (Ruvkun G., Perspective: Glimpses of a tiny RNA world, Science 294, 779 (2001)).

[2344] It is yet further appreciated that a function of VGAM170 is inhibition of expression of host target genes, as part of a novel viral mechanism of attacking a host. Accordingly, utilities of VGAM170 include diagnosis, prevention and treatment of viral infection by Vaccinia virus. Specific functions, and accordingly utilities, of VGAM170 correlate with, and may be deduced from, the identity of the host target genes which VGAM170 binds and inhibits, and the function of these host target genes, as elaborated hereinbelow.

[2345] Nucleotide sequences of the VGAM170 precursor RNA, herein designated VGAM PRECURSOR RNA, and of the diced VGAM170 RNA, herein designated VGAM RNA, and a schematic representation of the secondary folding of VGAM170 folded precursor RNA, herein designated VGAM FOLDED PRECURSOR RNA, of VGAM170 are further described hereinbelow with reference to Table 1.

[2346] Nucleotide sequences of host target binding sites, such as BINDING SITE-I, BINDING SITE-II and BINDING SITE-III of FIG. 1, found on, and schematic representation of the complementarity of each of these host target binding sites to VGAM170 RNA, herein designated VGAM RNA, are described hereinbelow with reference to Table 2.

[2347] FIG. 1 further provides a conceptual description of another novel bioinformatically detected viral gene of the present invention, referred to here as Viral Genomic Address Messenger 171 (VGAM171) viral gene, which modulates expression of respective host target genes thereof, the function and utility of which host target genes is known in the art.

[2348] VGAM171 is a novel bioinformatically detected regulatory, non protein coding, viral micro RNA (miRNA) gene. The method by which VGAM171 was detected is described hereinabove with reference to FIGS. 2-8.

[2349] VGAM171 gene, herein designated VGAM GENE, is a viral gene contained in the genome of Vaccinia virus. VGAM171 host target gene, herein designated VGAM HOST TARGET GENE, is a human gene contained in the human genome.

[2350] VGAM171 gene, herein designated VGAM GENE, encodes a VGAM171 precursor RNA, herein designated VGAM PRECURSOR RNA. Similar to other miRNA genes, and unlike most ordinary genes, VGAM171 precursor RNA, herein designated VGAM PRECURSOR RNA, does not encode a protein. A nucleotide sequence identical or highly similar to the nucleotide sequence of VGAM171 precursor RNA is designated SEQ ID: 157, and is provided hereinbelow with reference to the sequence listing part. Nucleotide sequence SEQ ID:157 is located at position 90530 relative to the genome of Vaccinia virus.

[2351] VGAM171 precursor RNA, herein designated VGAM PRECURSOR RNA, folds onto itself, forming VGAM171 folded precursor RNA, herein designated VGAM FOLDED PRECURSOR RNA, which has a two-dimensional hairpin structure. As is well known in the art, this hairpin structure, is typical of RNA encoded by miRNA genes, and is due to the fact that the nucleotide sequence of the first half of the RNA encoded by a miRNA gene is an accurate or partial inversed-reversed sequence of the nucleotide sequence of the second half thereof.

[2352] An enzyme complex designated DICER COMPLEX, dices the VGAM171 folded precursor RNA, herein designated VGAM FOLDED PRECURSOR RNA, into VGAM171 RNA, herein designated VGAM RNA, a single stranded ˜22 nt long RNA segment. As is known in the art, dicing of a hairpin structured RNA precursor product into a short ˜22 nt RNA segment is catalyzed by an enzyme complex comprising an enzyme called Dicer together with other necessary proteins. A probable (over 75%) nucleotide sequence of VGAM171 RNA is designated SEQ ID:506, and is provided hereinbelow with reference to the sequence listing part.

[2353] VGAM171 host target gene, herein designated VGAM HOST TARGET GENE, encodes a corresponding messenger RNA, VGAM171 host target RNA, herein designated VGAM HOST TARGET RNA. VGAM171 host target RNA, herein designated VGAM HOST TARGET RNA, comprises three regions, as is typical of mRNA of a protein coding gene: a 5 untranslated region, a protein coding region and a 3 untranslated region, designated 5UTR, PROTEIN CODING and 3UTR respectively.

[2354] VGAM171 RNA, herein designated VGAM RNA, binds complementarily to one or more host target binding sites located in untranslated regions of VGAM171 host target RNA, herein designated VGAM HOST TARGET RNA. This complementary binding is due to the fact that the nucleotide sequence of VGAM171 RNA, herein designated VGAM RNA, is an accurate or a partial inversed-reversed sequence of the nucleotide sequence of each of the host target binding sites. As an illustration, FIG. 1 shows 3 such host target binding sites, designated BINDING SITE I, BINDING SITE II and BINDING SITE III respectively. It is appreciated that the number of host target binding sites shown in FIG. 1 is meant as an illustration only, and is not meant to be limiting VGAM171 RNA, herein designated VGAM RNA, may have a different number of host target binding sites in untranslated regions of a VGAM171 host target RNA, herein designated VGAM HOST TARGET RNA. It is further appreciated that while FIG. 1 depicts host target binding sites in the 3UTR region, this is meant as an example only these host target binding sites may be located in the 3UTR region, the 5UTR region, or in both 3UTR and 5UTR regions.

[2355] The complementary binding of VGAM171 RNA, herein designated VGAM RNA, to host target binding sites on VGAM171 host target RNA, herein designated VGAM HOST TARGET RNA, such as BINDING SITE I, BINDING SITE II and BINDING SITE III, inhibits translation of VGAM171 host target RNA, herein designated VGAM HOST TARGET RNA, into VGAM171 host target protein, herein designated VGAM HOST TARGET PROTEIN. VGAM host target protein is therefore outlined by a broken line.

[2356] It is appreciated that VGAM171 host target gene, herein designated VGAM HOST TARGET GENE, in fact represents a plurality of VGAM171 host target genes. The mRNA of each one of this plurality of VGAM171 host target genes comprises one or more host target binding sites, each having a nucleotide sequence which is at least partly complementary to VGAM171 RNA, herein designated VGAM RNA, and which when bound by VGAM171 RNA, herein designated VGAM RNA, causes inhibition of translation of respective one or more VGAM171 host target proteins.

[2357] It is further appreciated by one skilled in the art that the mode of translational inhibition illustrated by FIG. 1 with specific reference to translational inhibition exerted by VGAM171 gene, herein designated VGAM GENE, on one or more VGAM171 host target gene, herein designated VGAM HOST TARGET GENE, is in fact common to other known non-viral miRNA genes. As mentioned hereinabove with reference to the background section, although a specific complementary binding site has been demonstrated only for some of the known miRNA genes (primarily Lin-4 and Let-7), all other recently discovered miRNA genes are also believed by those skilled in the art to modulate expression of other genes by complementary binding, although specific complementary binding sites of these other miRNA genes have not yet been found (Ruvkun G., Perspective: Glimpses of a tiny RNA world, Science 294, 779 (2001)).

[2358] It is yet further appreciated that a function of VGAM171 is inhibition of expression of host target genes, as part of a novel viral mechanism of attacking a host. Accordingly, utilities of VGAM171 include diagnosis, prevention and treatment of viral infection by Vaccinia virus. Specific functions, and accordingly utilities, of VGAM171 correlate with, and may be deduced from, the identity of the host target genes which VGAM171 binds and inhibits, and the function of these host target genes, as elaborated hereinbelow.

[2359] Nucleotide sequences of the VGAM171 precursor RNA, herein designated VGAM PRECURSOR RNA, and of the diced VGAM171 RNA, herein designated VGAM RNA, and a schematic representation of the secondary folding of VGAM171 folded precursor RNA, herein designated VGAM FOLDED PRECURSOR RNA, of VGAM171 are further described hereinbelow with reference to Table 1.

[2360] Nucleotide sequences of host target binding sites, such as BINDING SITE-I, BINDING SITE-II and BINDING SITE-III of FIG. 1, found on, and schematic representation of the complementarity of each of these host target binding sites to VGAM171 RNA, herein designated VGAM RNA, are described hereinbelow with reference to Table 2.

[2361] FIG. 1 further provides a conceptual description of another novel bioinformatically detected viral gene of the present invention, referred to here as Viral Genomic Address Messenger 172 (VGAM172) viral gene, which modulates expression of respective host target genes thereof, the function and utility of which host target genes is known in the art.

[2362] VGAM172 is a novel bioinformatically detected regulatory, non protein coding, viral micro RNA (miRNA) gene. The method by which VGAM172 was detected is described hereinabove with reference to FIGS. 2-8.

[2363] VGAM172 gene, herein designated VGAM GENE, is a viral gene contained in the genome of Vaccinia virus. VGAM172 host target gene, herein designated VGAM HOST TARGET GENE, is a human gene contained in the human genome.

[2364] VGAM172 gene, herein designated VGAM GENE, encodes a VGAM172 precursor RNA, herein designated VGAM PRECURSOR RNA. Similar to other miRNA genes, and unlike most ordinary genes, VGAM172 precursor RNA, herein designated VGAM PRECURSOR RNA, does not encode a protein. A nucleotide sequence identical or highly similar to the nucleotide sequence of VGAM172 precursor RNA is designated SEQ ID:158, and is provided hereinbelow with reference to the sequence listing part. Nucleotide sequence SEQ ID:158 is located at position 90682 relative to the genome of Vaccinia virus.

[2365] VGAM172 precursor RNA, herein designated VGAM PRECURSOR RNA, folds onto itself, forming VGAM172 folded precursor RNA, herein designated VGAM FOLDED PRECURSOR RNA, which has a two-dimensional hairpin structure. As is well known in the art, this hairpin structure, is typical of RNA encoded by miRNA genes, and is due to the fact that the nucleotide sequence of the first half of the RNA encoded by a miRNA gene is an accurate or partial inversed-reversed sequence of the nucleotide sequence of the second half thereof.

[2366] An enzyme complex designated DICER COMPLEX, dices the VGAM172 folded precursor RNA, herein designated VGAM FOLDED PRECURSOR RNA, into VGAM172 RNA, herein designated VGAM RNA, a single stranded ˜22 nt long RNA segment. As is known in the art, dicing of a hairpin structured RNA precursor product into a short ˜22 nt RNA segment is catalyzed by an enzyme complex comprising an enzyme called Dicer together with other necessary proteins. A probable (over 76%) nucleotide sequence of VGAM172 RNA is designated SEQ ID:507, and is provided hereinbelow with reference to the sequence listing part.

[2367] VGAM172 host target gene, herein designated VGAM HOST TARGET GENE, encodes a corresponding messenger RNA, VGAM172 host target RNA, herein designated VGAM HOST TARGET RNA. VGAM172 host target RNA, herein designated VGAM HOST TARGET RNA, comprises three regions, as is typical of mRNA of a protein coding gene: a 5 untranslated region, a protein coding region and a 3 untranslated region, designated 5UTR, PROTEIN CODING and 3UTR respectively.

[2368] VGAM172 RNA, herein designated VGAM RNA, binds complementarily to one or more host target binding sites located in untranslated regions of VGAM172 host target RNA, herein designated VGAM HOST TARGET RNA. This complementary binding is due to the fact that the nucleotide sequence of VGAM172 RNA, herein designated VGAM RNA, is an accurate or a partial inversed-reversed sequence of the nucleotide sequence of each of the host target binding sites. As an illustration, FIG. 1 shows 3 such host target binding sites, designated BINDING SITE I, BINDING SITE II and BINDING SITE III respectively. It is appreciated that the number of host target binding sites shown in FIG. 1 is meant as an illustration only, and is not meant to be limiting VGAM172 RNA, herein designated VGAM RNA, may have a different number of host target binding sites in untranslated regions of a VGAM172 host target RNA, herein designated VGAM HOST TARGET RNA. It is further appreciated that while FIG. 1 depicts host target binding sites in the 3UTR region, this is meant as an example only these host target binding sites may be located in the 3UTR region, the 5UTR region, or in both 3UTR and 5UTR regions.

[2369] The complementary binding of VGAM172 RNA, herein designated VGAM RNA, to host target binding sites on VGAM172 host target RNA, herein designated VGAM HOST TARGET RNA, such as BINDING SITE I, BINDING SITE II and BINDING SITE III, inhibits translation of VGAM172 host target RNA, herein designated VGAM HOST TARGET RNA, into VGAM172 host target protein, herein designated VGAM HOST TARGET PROTEIN. VGAM host target protein is therefore outlined by a broken line.

[2370] It is appreciated that VGAM172 host target gene, herein designated VGAM HOST TARGET GENE, in fact represents a plurality of VGAM172 host target genes. The mRNA of each one of this plurality of VGAM172 host target genes comprises one or more host target binding sites, each having a nucleotide sequence which is at least partly complementary to VGAM172 RNA, herein designated VGAM RNA, and which when bound by VGAM172 RNA, herein designated VGAM RNA, causes inhibition of translation of respective one or more VGAM172 host target proteins.

[2371] It is further appreciated by one skilled in the art that the mode of translational inhibition illustrated by FIG. 1 with specific reference to translational inhibition exerted by VGAM172 gene, herein designated VGAM GENE, on one or more VGAM172 host target gene, herein designated VGAM HOST TARGET GENE, is in fact common to other known non-viral miRNA genes. As mentioned hereinabove with reference to the background section, although a specific complementary binding site has been demonstrated only for some of the known miRNA genes (primarily Lin-4 and Let-7), all other recently discovered miRNA genes are also believed by those skilled in the art to modulate expression of other genes by complementary binding, although specific complementary binding sites of these other miRNA genes have not yet been found (Ruvkun G., Perspective: Glimpses of a tiny RNA world, Science 294, 779 (2001)).

[2372] It is yet further appreciated that a function of VGAM172 is inhibition of expression of host target genes, as part of a novel viral mechanism of attacking a host. Accordingly, utilities of VGAM172 include diagnosis, prevention and treatment of viral infection by Vaccinia virus. Specific functions, and accordingly utilities, of VGAM172 correlate with, and may be deduced from, the identity of the host target genes which VGAM172 binds and inhibits, and the function of these host target genes, as elaborated hereinbelow.

[2373] Nucleotide sequences of the VGAM172 precursor RNA, herein designated VGAM PRECURSOR RNA, and of the diced VGAM172 RNA, herein designated VGAM RNA, and a schematic representation of the secondary folding of VGAM172 folded precursor RNA, herein designated VGAM FOLDED PRECURSOR RNA, of VGAM172 are further described hereinbelow with reference to Table 1.

[2374] Nucleotide sequences of host target binding sites, such as BINDING SITE-I, BINDING SITE-II and BINDING SITE-III of FIG. 1, found on, and schematic representation of the complementarity of each of these host target binding sites to VGAM172 RNA, herein designated VGAM RNA, are described hereinbelow with reference to Table 2.

[2375] FIG. 1 further provides a conceptual description of another novel bioinformatically detected viral gene of the present invention, referred to here as Viral Genomic Address Messenger 173 (VGAM173) viral gene, which modulates expression of respective host target genes thereof, the function and utility of which host target genes is known in the art.

[2376] VGAM173 is a novel bioinformatically detected regulatory, non protein coding, viral micro RNA (miRNA) gene. The method by which VGAM173 was detected is described hereinabove with reference to FIGS. 2-8.

[2377] VGAM173 gene, herein designated VGAM GENE, is a viral gene contained in the genome of Vaccinia virus. VGAM173 host target gene, herein designated VGAM HOST TARGET GENE, is a human gene contained in the human genome.

[2378] VGAM173 gene, herein designated VGAM GENE, encodes a VGAM173 precursor RNA, herein designated VGAM PRECURSOR RNA. Similar to other miRNA genes, and unlike most ordinary genes, VGAM173 precursor RNA, herein designated VGAM PRECURSOR RNA, does not encode a protein. A nucleotide sequence identical or highly similar to the nucleotide sequence of VGAM173 precursor RNA is designated SEQ ID:159, and is provided hereinbelow with reference to the sequence listing part. Nucleotide sequence SEQ ID:159 is located at position 90131 relative to the genome of Vaccinia virus.

[2379] VGAM173 precursor RNA, herein designated VGAM PRECURSOR RNA, folds onto itself, forming VGAM173 folded precursor RNA, herein designated VGAM FOLDED PRECURSOR RNA, which has a two-dimensional hairpin structure. As is well known in the art, this hairpin structure, is typical of RNA encoded by miRNA genes, and is due to the fact that the nucleotide sequence of the first half of the RNA encoded by a miRNA gene is an accurate or partial inversed-reversed sequence of the nucleotide sequence of the second half thereof.

[2380] An enzyme complex designated DICER COMPLEX, dices the VGAM173 folded precursor RNA, herein designated VGAM FOLDED PRECURSOR RNA, into VGAM173 RNA, herein designated VGAM RNA, a single stranded ˜22 nt long RNA segment. As is known in the art, dicing of a hairpin structured RNA precursor product into a short ˜22 nt RNA segment is catalyzed by an enzyme complex comprising an enzyme called Dicer together with other necessary proteins. A probable (over 82%) nucleotide sequence of VGAM173 RNA is designated SEQ ID:508, and is provided hereinbelow with reference to the sequence listing part.

[2381] VGAM173 host target gene, herein designated VGAM HOST TARGET GENE, encodes a corresponding messenger RNA, VGAM173 host target RNA, herein designated VGAM HOST TARGET RNA. VGAM173 host target RNA, herein designated VGAM HOST TARGET RNA, comprises three regions, as is typical of mRNA of a protein coding gene: a 5 untranslated region, a protein coding region and a 3 untranslated region, designated 5UTR, PROTEIN CODING and 3UTR respectively.

[2382] VGAM173 RNA, herein designated VGAM RNA, binds complementarily to one or more host target binding sites located in untranslated regions of VGAM173 host target RNA, herein designated VGAM HOST TARGET RNA. This complementary binding is due to the fact that the nucleotide sequence of VGAM173 RNA, herein designated VGAM RNA, is an accurate or a partial inversed-reversed sequence of the nucleotide sequence of each of the host target binding sites. As an illustration, FIG. 1 shows 3 such host target binding sites, designated BINDING SITE I, BINDING SITE II and BINDING SITE III respectively. It is appreciated that the number of host target binding sites shown in FIG. 1 is meant as an illustration only, and is not meant to be limiting VGAM173 RNA, herein designated VGAM RNA, may have a different number of host target binding sites in untranslated regions of a VGAM173 host target RNA, herein designated VGAM HOST TARGET RNA. It is further appreciated that while FIG. 1 depicts host target binding sites in the 3UTR region, this is meant as an example only these host target binding sites may be located in the 3UTR region, the 5UTR region, or in both 3UTR and 5UTR regions.

[2383] The complementary binding of VGAM173 RNA, herein designated VGAM RNA, to host target binding sites on VGAM173 host target RNA, herein designated VGAM HOST TARGET RNA, such as BINDING SITE I, BINDING SITE II and BINDING SITE III, inhibits translation of VGAM173 host target RNA, herein designated VGAM HOST TARGET RNA, into VGAM173 host target protein, herein designated VGAM HOST TARGET PROTEIN. VGAM host target protein is therefore outlined by a broken line.

[2384] It is appreciated that VGAM173 host target gene, herein designated VGAM HOST TARGET GENE, in fact represents a plurality of VGAM173 host target genes. The mRNA of each one of this plurality of VGAM173 host target genes comprises one or more host target binding sites, each having a nucleotide sequence which is at least partly complementary to VGAM173 RNA, herein designated VGAM RNA, and which when bound by VGAM173 RNA, herein designated VGAM RNA, causes inhibition of translation of respective one or more VGAM173 host target proteins.

[2385] It is further appreciated by one skilled in the art that the mode of translational inhibition illustrated by FIG. 1 with specific reference to translational inhibition exerted by VGAM173 gene, herein designated VGAM GENE, on one or more VGAM173 host target gene, herein designated VGAM HOST TARGET GENE, is in fact common to other known non-viral miRNA genes. As mentioned hereinabove with reference to the background section, although a specific complementary binding site has been demonstrated only for some of the known miRNA genes (primarily Lin-4 and Let-7), all other recently discovered miRNA genes are also believed by those skilled in the art to modulate expression of other genes by complementary binding, although specific complementary binding sites of these other miRNA genes have not yet been found (Ruvkun G., Perspective: Glimpses of a tiny RNA world, Science 294, 779 (2001)).

[2386] It is yet further appreciated that a function of VGAM173 is inhibition of expression of host target genes, as part of a novel viral mechanism of attacking a host. Accordingly, utilities of VGAM173 include diagnosis, prevention and treatment of viral infection by Vaccinia virus. Specific functions, and accordingly utilities, of VGAM173 correlate with, and may be deduced from, the identity of the host target genes which VGAM173 binds and inhibits, and the function of these host target genes, as elaborated hereinbelow.

[2387] Nucleotide sequences of the VGAM173 precursor RNA, herein designated VGAM PRECURSOR RNA, and of the diced VGAM173 RNA, herein designated VGAM RNA, and a schematic representation of the secondary folding of VGAM173 folded precursor RNA, herein designated VGAM FOLDED PRECURSOR RNA, of VGAM173 are further described hereinbelow with reference to Table 1.

[2388] Nucleotide sequences of host target binding sites, such as BINDING SITE-I, BINDING SITE-II and BINDING SITE-III of FIG. 1, found on, and schematic representation of the complementarity of each of these host target binding sites to VGAM173 RNA, herein designated VGAM RNA, are described hereinbelow with reference to Table 2.

[2389] FIG. 1 further provides a conceptual description of another novel bioinformatically detected viral gene of the present invention, referred to here as Viral Genomic Address Messenger 174 (VGAM174) viral gene, which modulates expression of respective host target genes thereof, the function and utility of which host target genes is known in the art.

[2390] VGAM174 is a novel bioinformatically detected regulatory, non protein coding, viral micro RNA (miRNA) gene. The method by which VGAM174 was detected is described hereinabove with reference to FIGS. 2-8.

[2391] VGAM174 gene, herein designated VGAM GENE, is a viral gene contained in the genome of Vaccinia virus. VGAM174 host target gene, herein designated VGAM HOST TARGET GENE, is a human gene contained in the human genome.

[2392] VGAM174 gene, herein designated VGAM GENE, encodes a VGAM174 precursor RNA, herein designated VGAM PRECURSOR RNA. Similar to other miRNA genes, and unlike most ordinary genes, VGAM174 precursor RNA, herein designated VGAM PRECURSOR RNA, does not encode a protein. A nucleotide sequence identical or highly similar to the nucleotide sequence of VGAM174 precursor RNA is designated SEQ ID:160, and is provided hereinbelow with reference to the sequence listing part. Nucleotide sequence SEQ ID: 160 is located at position 89784 relative to the genome of Vaccinia virus.

[2393] VGAM174 precursor RNA, herein designated VGAM PRECURSOR RNA, folds onto itself, forming VGAM174 folded precursor RNA, herein designated VGAM FOLDED PRECURSOR RNA, which has a two-dimensional hairpin structure. As is well known in the art, this hairpin structure, is typical of RNA encoded by miRNA genes, and is due to the fact that the nucleotide sequence of the first half of the RNA encoded by a miRNA gene is an accurate or partial inversed-reversed sequence of the nucleotide sequence of the second half thereof.

[2394] An enzyme complex designated DICER COMPLEX, dices the VGAM174 folded precursor RNA, herein designated VGAM FOLDED PRECURSOR RNA, into VGAM174 RNA, herein designated VGAM RNA, a single stranded ˜22 nt long RNA segment. As is known in the art, dicing of a hairpin structured RNA precursor product into a short ˜22 nt RNA segment is catalyzed by an enzyme complex comprising an enzyme called Dicer together with other necessary proteins. A probable (over 78%) nucleotide sequence of VGAM174 RNA is designated SEQ ID:509, and is provided hereinbelow with reference to the sequence listing part.

[2395] VGAM174 host target gene, herein designated VGAM HOST TARGET GENE, encodes a corresponding messenger RNA, VGAM174 host target RNA, herein designated VGAM HOST TARGET RNA. VGAM174 host target RNA, herein designated VGAM HOST TARGET RNA, comprises three regions, as is typical of mRNA of a protein coding gene: a 5 untranslated region, a protein coding region and a 3 untranslated region, designated 5UTR, PROTEIN CODING and 3UTR respectively.

[2396] VGAM174 RNA, herein designated VGAM RNA, binds complementarily to one or more host target binding sites located in untranslated regions of VGAM174 host target RNA, herein designated VGAM HOST TARGET RNA. This complementary binding is due to the fact that the nucleotide sequence of VGAM174 RNA, herein designated VGAM RNA, is an accurate or a partial inversed-reversed sequence of the nucleotide sequence of each of the host target binding sites. As an illustration, FIG. 1 shows 3 such host target binding sites, designated BINDING SITE I, BINDING SITE II and BINDING SITE III respectively. It is appreciated that the number of host target binding sites shown in FIG. 1 is meant as an illustration only, and is not meant to be limiting VGAM174 RNA, herein designated VGAM RNA, may have a different number of host target binding sites in untranslated regions of a VGAM174 host target RNA, herein designated VGAM HOST TARGET RNA. It is further appreciated that while FIG. 1 depicts host target binding sites in the 3UTR region, this is meant as an example only these host target binding sites may be located in the 3UTR region, the 5UTR region, or in both 3UTR and 5UTR regions.

[2397] The complementary binding of VGAM174 RNA, herein designated VGAM RNA, to host target binding sites on VGAM174 host target RNA, herein designated VGAM HOST TARGET RNA, such as BINDING SITE I, BINDING SITE II and BINDING SITE III, inhibits translation of VGAM174 host target RNA, herein designated VGAM HOST TARGET RNA, into VGAM174 host target protein, herein designated VGAM HOST TARGET PROTEIN. VGAM host target protein is therefore outlined by a broken line.

[2398] It is appreciated that VGAM174 host target gene, herein designated VGAM HOST TARGET GENE, in fact represents a plurality of VGAM174 host target genes. The mRNA of each one of this plurality of VGAM174 host target genes comprises one or more host target binding sites, each having a nucleotide sequence which is at least partly complementary to VGAM174 RNA, herein designated VGAM RNA, and which when bound by VGAM174 RNA, herein designated VGAM RNA, causes inhibition of translation of respective one or more VGAM174 host target proteins.

[2399] It is further appreciated by one skilled in the art that the mode of translational inhibition illustrated by FIG. 1 with specific reference to translational inhibition exerted by VGAM174 gene, herein designated VGAM GENE, on one or more VGAM174 host target gene, herein designated VGAM HOST TARGET GENE, is in fact common to other known non-viral miRNA genes. As mentioned hereinabove with reference to the background section, although a specific complementary binding site has been demonstrated only for some of the known miRNA genes (primarily Lin-4 and Let-7), all other recently discovered miRNA genes are also believed by those skilled in the art to modulate expression of other genes by complementary binding, although specific complementary binding sites of these other miRNA genes have not yet been found (Ruvkun G., Perspective: Glimpses of a tiny RNA world, Science 294, 779 (2001)).

[2400] It is yet further appreciated that a function of VGAM174 is inhibition of expression of host target genes, as part of a novel viral mechanism of attacking a host. Accordingly, utilities of VGAM174 include diagnosis, prevention and treatment of viral infection by Vaccinia virus. Specific functions, and accordingly utilities, of VGAM174 correlate with, and may be deduced from, the identity of the host target genes which VGAM174 binds and inhibits, and the function of these host target genes, as elaborated hereinbelow.

[2401] Nucleotide sequences of the VGAM174 precursor RNA, herein designated VGAM PRECURSOR RNA, and of the diced VGAM174 RNA, herein designated VGAM RNA, and a schematic representation of the secondary folding of VGAM174 folded precursor RNA, herein designated VGAM FOLDED PRECURSOR RNA, of VGAM174 are further described hereinbelow with reference to Table 1.

[2402] Nucleotide sequences of host target binding sites, such as BINDING SITE-I, BINDING SITE-II and BINDING SITE-III of FIG. 1, found on, and schematic representation of the complementarity of each of these host target binding sites to VGAM174 RNA, herein designated VGAM RNA, are described hereinbelow with reference to Table 2.

[2403] FIG. 1 further provides a conceptual description of another novel bioinformatically detected viral gene of the present invention, referred to here as Viral Genomic Address Messenger 175 (VGAM175) viral gene, which modulates expression of respective host target genes thereof, the function and utility of which host target genes is known in the art.

[2404] VGAM175 is a novel bioinformatically detected regulatory, non protein coding, viral micro RNA (miRNA) gene. The method by which VGAM175 was detected is described hereinabove with reference to FIGS. 2-8.

[2405] VGAM175 gene, herein designated VGAM GENE, is a viral gene contained in the genome of Vaccinia virus. VGAM175 host target gene, herein designated VGAM HOST TARGET GENE, is a human gene contained in the human genome.

[2406] VGAM175 gene, herein designated VGAM GENE, encodes a VGAM175 precursor RNA, herein designated VGAM PRECURSOR RNA. Similar to other miRNA genes, and unlike most ordinary genes, VGAM175 precursor RNA, herein designated VGAM PRECURSOR RNA, does not encode a protein. A nucleotide sequence identical or highly similar to the nucleotide sequence of VGAM175 precursor RNA is designated SEQ ID:161, and is provided hereinbelow with reference to the sequence listing part. Nucleotide sequence SEQ ID:161 is located at position 91213 relative to the genome of Vaccinia virus.

[2407] VGAM175 precursor RNA, herein designated VGAM PRECURSOR RNA, folds onto itself, forming VGAM175 folded precursor RNA, herein designated VGAM FOLDED PRECURSOR RNA, which has a two-dimensional hairpin structure. As is well known in the art, this hairpin structure, is typical of RNA encoded by miRNA genes, and is due to the fact that the nucleotide sequence of the first half of the RNA encoded by a miRNA gene is an accurate or partial inversed-reversed sequence of the nucleotide sequence of the second half thereof.

[2408] An enzyme complex designated DICER COMPLEX, dices the VGAM175 folded precursor RNA, herein designated VGAM FOLDED PRECURSOR RNA, into VGAM175 RNA, herein designated VGAM RNA, a single stranded ˜22 nt long RNA segment. As is known in the art, dicing of a hairpin structured RNA precursor product into a short ˜22 nt RNA segment is catalyzed by an enzyme complex comprising an enzyme called Dicer together with other necessary proteins. A probable (over 86%) nucleotide sequence of VGAM175 RNA is designated SEQ ID:510, and is provided hereinbelow with reference to the sequence listing part.

[2409] VGAM175 host target gene, herein designated VGAM HOST TARGET GENE, encodes a corresponding messenger RNA, VGAM175 host target RNA, herein designated VGAM HOST TARGET RNA. VGAM175 host target RNA, herein designated VGAM HOST TARGET RNA, comprises three regions, as is typical of mRNA of a protein coding gene: a 5 untranslated region, a protein coding region and a 3 untranslated region, designated 5UTR, PROTEIN CODING and 3UTR respectively.

[2410] VGAM175 RNA, herein designated VGAM RNA, binds complementarily to one or more host target binding sites located in untranslated regions of VGAM175 host target RNA, herein designated VGAM HOST TARGET RNA. This complementary binding is due to the fact that the nucleotide sequence of VGAM175 RNA, herein designated VGAM RNA, is an accurate or a partial inversed-reversed sequence of the nucleotide sequence of each of the host target binding sites. As an illustration, FIG. 1 shows 3 such host target binding sites, designated BINDING SITE I, BINDING SITE II and BINDING SITE III respectively. It is appreciated that the number of host target binding sites shown in FIG. 1 is meant as an illustration only, and is not meant to be limiting VGAM175 RNA, herein designated VGAM RNA, may have a different number of host target binding sites in untranslated regions of a VGAM175 host target RNA, herein designated VGAM HOST TARGET RNA. It is further appreciated that while FIG. 1 depicts host target binding sites in the 3UTR region, this is meant as an example only these host target binding sites may be located in the 3UTR region, the 5UTR region, or in both 3UTR and 5UTR regions.

[2411] The complementary binding of VGAM175 RNA, herein designated VGAM RNA, to host target binding sites on VGAM175 host target RNA, herein designated VGAM HOST TARGET RNA, such as BINDING SITE I, BINDING SITE II and BINDING SITE III, inhibits translation of VGAM175 host target RNA, herein designated VGAM HOST TARGET RNA, into VGAM175 host target protein, herein designated VGAM HOST TARGET PROTEIN. VGAM host target protein is therefore outlined by a broken line.

[2412] It is appreciated that VGAM175 host target gene, herein designated VGAM HOST TARGET GENE, in fact represents a plurality of VGAM175 host target genes. The mRNA of each one of this plurality of VGAM175 host target genes comprises one or more host target binding sites, each having a nucleotide sequence which is at least partly complementary to VGAM175 RNA, herein designated VGAM RNA, and which when bound by VGAM175 RNA, herein designated VGAM RNA, causes inhibition of translation of respective one or more VGAM175 host target proteins.

[2413] It is further appreciated by one skilled in the art that the mode of translational inhibition illustrated by FIG. 1 with specific reference to translational inhibition exerted by VGAM175 gene, herein designated VGAM GENE, on one or more VGAM175 host target gene, herein designated VGAM HOST TARGET GENE, is in fact common to other known non-viral miRNA genes. As mentioned hereinabove with reference to the background section, although a specific complementary binding site has been demonstrated only for some of the known miRNA genes (primarily Lin-4 and Let-7), all other recently discovered miRNA genes are also believed by those skilled in the art to modulate expression of other genes by complementary binding, although specific complementary binding sites of these other miRNA genes have not yet been found (Ruvkun G., Perspective: Glimpses of a tiny RNA world, Science 294, 779 (2001)).

[2414] It is yet further appreciated that a function of VGAM175 is inhibition of expression of host target genes, as part of a novel viral mechanism of attacking a host. Accordingly, utilities of VGAM175 include diagnosis, prevention and treatment of viral infection by Vaccinia virus. Specific functions, and accordingly utilities, of VGAM175 correlate with, and may be deduced from, the identity of the host target genes which VGAM175 binds and inhibits, and the function of these host target genes, as elaborated hereinbelow.

[2415] Nucleotide sequences of the VGAM175 precursor RNA, herein designated VGAM PRECURSOR RNA, and of the diced VGAM175 RNA, herein designated VGAM RNA, and a schematic representation of the secondary folding of VGAM175 folded precursor RNA, herein designated VGAM FOLDED PRECURSOR RNA, of VGAM175 are further described hereinbelow with reference to Table 1.

[2416] Nucleotide sequences of host target binding sites, such as BINDING SITE-I, BINDING SITE-II and BINDING SITE-III of FIG. 1, found on, and schematic representation of the complementarity of each of these host target binding sites to VGAM175 RNA, herein designated VGAM RNA, are described hereinbelow with reference to Table 2.

[2417] FIG. 1 further provides a conceptual description of another novel bioinformatically detected viral gene of the present invention, referred to here as Viral Genomic Address Messenger 176 (VGAM176) viral gene, which modulates expression of respective host target genes thereof, the function and utility of which host target genes is known in the art.

[2418] VGAM176 is a novel bioinformatically detected regulatory, non protein coding, viral micro RNA (miRNA) gene. The method by which VGAM176 was detected is described hereinabove with reference to FIGS. 2-8.

[2419] VGAM176 gene, herein designated VGAM GENE, is a viral gene contained in the genome of Vaccinia virus. VGAM176 host target gene, herein designated VGAM HOST TARGET GENE, is a human gene contained in the human genome.

[2420] VGAM176 gene, herein designated VGAM GENE, encodes a VGAM176 precursor RNA, herein designated VGAM PRECURSOR RNA. Similar to other miRNA genes, and unlike most ordinary genes, VGAM176 precursor RNA, herein designated VGAM PRECURSOR RNA, does not encode a protein. A nucleotide sequence identical or highly similar to the nucleotide sequence of VGAM176 precursor RNA is designated SEQ ID:162, and is provided hereinbelow with reference to the sequence listing part. Nucleotide sequence SEQ ID: 162 is located at position 90963 relative to the genome of Vaccinia virus.

[2421] VGAM176 precursor RNA, herein designated VGAM PRECURSOR RNA, folds onto itself, forming VGAM176 folded precursor RNA, herein designated VGAM FOLDED PRECURSOR RNA, which has a two-dimensional hairpin structure. As is well known in the art, this hairpin structure, is typical of RNA encoded by miRNA genes, and is due to the fact that the nucleotide sequence of the first half of the RNA encoded by a miRNA gene is an accurate or partial inversed-reversed sequence of the nucleotide sequence of the second half thereof.

[2422] An enzyme complex designated DICER COMPLEX, dices the VGAM176 folded precursor RNA, herein designated VGAM FOLDED PRECURSOR RNA, into VGAM176 RNA, herein designated VGAM RNA, a single stranded ˜22 nt long RNA segment. As is known in the art, dicing of a hairpin structured RNA precursor product into a short ˜22 nt RNA segment is catalyzed by an enzyme complex comprising an enzyme called Dicer together with other necessary proteins. A probable (over 78%) nucleotide sequence of VGAM176 RNA is designated SEQ ID:511, and is provided hereinbelow with reference to the sequence listing part.

[2423] VGAM176 host target gene, herein designated VGAM HOST TARGET GENE, encodes a corresponding messenger RNA, VGAM176 host target RNA, herein designated VGAM HOST TARGET RNA. VGAM176 host target RNA, herein designated VGAM HOST TARGET RNA, comprises three regions, as is typical of mRNA of a protein coding gene: a 5 untranslated region, a protein coding region and a 3 untranslated region, designated 5UTR, PROTEIN CODING and 3UTR respectively.

[2424] VGAM176 RNA, herein designated VGAM RNA, binds complementarily to one or more host target binding sites located in untranslated regions of VGAM176 host target RNA, herein designated VGAM HOST TARGET RNA. This complementary binding is due to the fact that the nucleotide sequence of VGAM176 RNA, herein designated VGAM RNA, is an accurate or a partial inversed-reversed sequence of the nucleotide sequence of each of the host target binding sites. As an illustration, FIG. 1 shows 3 such host target binding sites, designated BINDING SITE I, BINDING SITE II and BINDING SITE III respectively. It is appreciated that the number of host target binding sites shown in FIG. 1 is meant as an illustration only, and is not meant to be limiting VGAM176 RNA, herein designated VGAM RNA, may have a different number of host target binding sites in untranslated regions of a VGAM176 host target RNA, herein designated VGAM HOST TARGET RNA. It is further appreciated that while FIG. 1 depicts host target binding sites in the 3UTR region, this is meant as an example only these host target binding sites may be located in the 3UTR region, the 5UTR region, or in both 3UTR and 5UTR regions.

[2425] The complementary binding of VGAM176 RNA, herein designated VGAM RNA, to host target binding sites on VGAM176 host target RNA, herein designated VGAM HOST TARGET RNA, such as BINDING SITE I, BINDING SITE II and BINDING SITE III, inhibits translation of VGAM176 host target RNA, herein designated VGAM HOST TARGET RNA, into VGAM176 host target protein, herein designated VGAM HOST TARGET PROTEIN. VGAM host target protein is therefore outlined by a broken line.

[2426] It is appreciated that VGAM176 host target gene, herein designated VGAM HOST TARGET GENE, in fact represents a plurality of VGAM176 host target genes. The mRNA of each one of this plurality of VGAM176 host target genes comprises one or more host target binding sites, each having a nucleotide sequence which is at least partly complementary to VGAM176 RNA, herein designated VGAM RNA, and which when bound by VGAM176 RNA, herein designated VGAM RNA, causes inhibition of translation of respective one or more VGAM176 host target proteins.

[2427] It is further appreciated by one skilled in the art that the mode of translational inhibition illustrated by FIG. 1 with specific reference to translational inhibition exerted by VGAM176 gene, herein designated VGAM GENE, on one or more VGAM176 host target gene, herein designated VGAM HOST TARGET GENE, is in fact common to other known non-viral miRNA genes. As mentioned hereinabove with reference to the background section, although a specific complementary binding site has been demonstrated only for some of the known miRNA genes (primarily Lin-4 and Let-7), all other recently discovered miRNA genes are also believed by those skilled in the art to modulate expression of other genes by complementary binding, although specific complementary binding sites of these other miRNA genes have not yet been found (Ruvkun G., Perspective: Glimpses of a tiny RNA world, Science 294, 779 (2001)).

[2428] It is yet further appreciated that a function of VGAM176 is inhibition of expression of host target genes, as part of a novel viral mechanism of attacking a host. Accordingly, utilities of VGAM176 include diagnosis, prevention and treatment of viral infection by Vaccinia virus. Specific functions, and accordingly utilities, of VGAM176 correlate with, and may be deduced from, the identity of the host target genes which VGAM176 binds and inhibits, and the function of these host target genes, as elaborated hereinbelow.

[2429] Nucleotide sequences of the VGAM176 precursor RNA, herein designated VGAM PRECURSOR RNA, and of the diced VGAM176 RNA, herein designated VGAM RNA, and a schematic representation of the secondary folding of VGAM176 folded precursor RNA, herein designated VGAM FOLDED PRECURSOR RNA, of VGAM176 are further described hereinbelow with reference to Table 1.

[2430] Nucleotide sequences of host target binding sites, such as BINDING SITE-I, BINDING SITE-II and BINDING SITE-III of FIG. 1, found on, and schematic representation of the complementarity of each of these host target binding sites to VGAM176 RNA, herein designated VGAM RNA, are described hereinbelow with reference to Table 2.

[2431] FIG. 1 further provides a conceptual description of another novel bioinformatically detected viral gene of the present invention, referred to here as Viral Genomic Address Messenger 177 (VGAM177) viral gene, which modulates expression of respective host target genes thereof, the function and utility of which host target genes is known in the art.

[2432] VGAM177 is a novel bioinformatically detected regulatory, non protein coding, viral micro RNA (miRNA) gene. The method by which VGAM177 was detected is described hereinabove with reference to FIGS. 2-8.

[2433] VGAM177 gene, herein designated VGAM GENE, is a viral gene contained in the genome of Vaccinia virus. VGAM177 host target gene, herein designated VGAM HOST TARGET GENE, is a human gene contained in the human genome.

[2434] VGAM177 gene, herein designated VGAM GENE, encodes a VGAM177 precursor RNA, herein designated VGAM PRECURSOR RNA. Similar to other miRNA genes, and unlike most ordinary genes, VGAM177 precursor RNA, herein designated VGAM PRECURSOR RNA, does not encode a protein. A nucleotide sequence identical or highly similar to the nucleotide sequence of VGAM177 precursor RNA is designated SEQ ID:163, and is provided hereinbelow with reference to the sequence listing part. Nucleotide sequence SEQ ID: 163 is located at position 92476 relative to the genome of Vaccinia virus.

[2435] VGAM177 precursor RNA, herein designated VGAM PRECURSOR RNA, folds onto itself, forming VGAM177 folded precursor RNA, herein designated VGAM FOLDED PRECURSOR RNA, which has a two-dimensional hairpin structure. As is well known in the art, this hairpin structure, is typical of RNA encoded by miRNA genes, and is due to the fact that the nucleotide sequence of the first half of the RNA encoded by a miRNA gene is an accurate or partial inversed-reversed sequence of the nucleotide sequence of the second half thereof.

[2436] An enzyme complex designated DICER COMPLEX, dices the VGAM177 folded precursor RNA, herein designated VGAM FOLDED PRECURSOR RNA, into VGAM177 RNA, herein designated VGAM RNA, a single stranded ˜22 nt long RNA segment. As is known in the art, dicing of a hairpin structured RNA precursor product into a short ˜22 nt RNA segment is catalyzed by an enzyme complex comprising an enzyme called Dicer together with other necessary proteins. A probable (over 72%) nucleotide sequence of VGAM177 RNA is designated SEQ ID:512, and is provided hereinbelow with reference to the sequence listing part.

[2437] VGAM177 host target gene, herein designated VGAM HOST TARGET GENE, encodes a corresponding messenger RNA, VGAM177 host target RNA, herein designated VGAM HOST TARGET RNA. VGAM177 host target RNA, herein designated VGAM HOST TARGET RNA, comprises three regions, as is typical of mRNA of a protein coding gene: a 5 untranslated region, a protein coding region and a 3 untranslated region, designated 5UTR, PROTEIN CODING and 3UTR respectively.

[2438] VGAM177 RNA, herein designated VGAM RNA, binds complementarily to one or more host target binding sites located in untranslated regions of VGAM177 host target RNA, herein designated VGAM HOST TARGET RNA. This complementary binding is due to the fact that the nucleotide sequence of VGAM177 RNA, herein designated VGAM RNA, is an accurate or a partial inversed-reversed sequence of the nucleotide sequence of each of the host target binding sites. As an illustration, FIG. 1 shows 3 such host target binding sites, designated BINDING SITE I, BINDING SITE II and BINDING SITE III respectively. It is appreciated that the number of host target binding sites shown in FIG. 1 is meant as an illustration only, and is not meant to be limiting VGAM177 RNA, herein designated VGAM RNA, may have a different number of host target binding sites in untranslated regions of a VGAM177 host target RNA, herein designated VGAM HOST TARGET RNA. It is further appreciated that while FIG. 1 depicts host target binding sites in the 3UTR region, this is meant as an example only these host target binding sites may be located in the 3UTR region, the 5UTR region, or in both 3UTR and 5UTR regions.

[2439] The complementary binding of VGAM177 RNA, herein designated VGAM RNA, to host target binding sites on VGAM177 host target RNA, herein designated VGAM HOST TARGET RNA, such as BINDING SITE I, BINDING SITE II and BINDING SITE III, inhibits translation of VGAM177 host target RNA, herein designated VGAM HOST TARGET RNA, into VGAM177 host target protein, herein designated VGAM HOST TARGET PROTEIN. VGAM host target protein is therefore outlined by a broken line.

[2440] It is appreciated that VGAM177 host target gene, herein designated VGAM HOST TARGET GENE, in fact represents a plurality of VGAM177 host target genes. The mRNA of each one of this plurality of VGAM177 host target genes comprises one or more host target binding sites, each having a nucleotide sequence which is at least partly complementary to VGAM177 RNA, herein designated VGAM RNA, and which when bound by VGAM177 RNA, herein designated VGAM RNA, causes inhibition of translation of respective one or more VGAM177 host target proteins.

[2441] It is further appreciated by one skilled in the art that the mode of translational inhibition illustrated by FIG. 1 with specific reference to translational inhibition exerted by VGAM177 gene, herein designated VGAM GENE, on one or more VGAM177 host target gene, herein designated VGAM HOST TARGET GENE, is in fact common to other known non-viral miRNA genes. As mentioned hereinabove with reference to the background section, although a specific complementary binding site has been demonstrated only for some of the known miRNA genes (primarily Lin-4 and Let-7), all other recently discovered miRNA genes are also believed by those skilled in the art to modulate expression of other genes by complementary binding, although specific complementary binding sites of these other miRNA genes have not yet been found (Ruvkun G., Perspective: Glimpses of a tiny RNA world, Science 294, 779 (2001)).

[2442] It is yet further appreciated that a function of VGAM177 is inhibition of expression of host target genes, as part of a novel viral mechanism of attacking a host. Accordingly, utilities of VGAM177 include diagnosis, prevention and treatment of viral infection by Vaccinia virus. Specific functions, and accordingly utilities, of VGAM177 correlate with, and may be deduced from, the identity of the host target genes which VGAM177 binds and inhibits, and the function of these host target genes, as elaborated hereinbelow.

[2443] Nucleotide sequences of the VGAM177 precursor RNA, herein designated VGAM PRECURSOR RNA, and of the diced VGAM177 RNA, herein designated VGAM RNA, and a schematic representation of the secondary folding of VGAM177 folded precursor RNA, herein designated VGAM FOLDED PRECURSOR RNA, of VGAM177 are further described hereinbelow with reference to Table 1.

[2444] Nucleotide sequences of host target binding sites, such as BINDING SITE-I, BINDING SITE-II and BINDING SITE-III of FIG. 1, found on, and schematic representation of the complementarity of each of these host target binding sites to VGAM177 RNA, herein designated VGAM RNA, are described hereinbelow with reference to Table 2.

[2445] FIG. 1 further provides a conceptual description of another novel bioinformatically detected viral gene of the present invention, referred to here as Viral Genomic Address Messenger 178 (VGAM178) viral gene, which modulates expression of respective host target genes thereof, the function and utility of which host target genes is known in the art.

[2446] VGAM178 is a novel bioinformatically detected regulatory, non protein coding, viral micro RNA (miRNA) gene. The method by which VGAM178 was detected is described hereinabove with reference to FIGS. 2-8.

[2447] VGAM178 gene, herein designated VGAM GENE, is a viral gene contained in the genome of Vaccinia virus. VGAM178 host target gene, herein designated VGAM HOST TARGET GENE, is a human gene contained in the human genome.

[2448] VGAM178 gene, herein designated VGAM GENE, encodes a VGAM178 precursor RNA, herein designated VGAM PRECURSOR RNA. Similar to other miRNA genes, and unlike most ordinary genes, VGAM178 precursor RNA, herein designated VGAM PRECURSOR RNA, does not encode a protein. A nucleotide sequence identical or highly similar to the nucleotide sequence of VGAM178 precursor RNA is designated SEQ ID:164, and is provided hereinbelow with reference to the sequence listing part. Nucleotide sequence SEQ ID: 164 is located at position 93077 relative to the genome of Vaccinia virus.

[2449] VGAM178 precursor RNA, herein designated VGAM PRECURSOR RNA, folds onto itself, forming VGAM178 folded precursor RNA, herein designated VGAM FOLDED PRECURSOR RNA, which has a two-dimensional hairpin structure. As is well known in the art, this hairpin structure, is typical of RNA encoded by miRNA genes, and is due to the fact that the nucleotide sequence of the first half of the RNA encoded by a miRNA gene is an accurate or partial inversed-reversed sequence of the nucleotide sequence of the second half thereof.

[2450] An enzyme complex designated DICER COMPLEX, dices the VGAM178 folded precursor RNA, herein designated VGAM FOLDED PRECURSOR RNA, into VGAM178 RNA, herein designated VGAM RNA, a single stranded ˜22 nt long RNA segment. As is known in the art, dicing of a hairpin structured RNA precursor product into a short ˜22 nt RNA segment is catalyzed by an enzyme complex comprising an enzyme called Dicer together with other necessary proteins. A probable (over 86%) nucleotide sequence of VGAM178 RNA is designated SEQ ID:513, and is provided hereinbelow with reference to the sequence listing part.

[2451] VGAM178 host target gene, herein designated VGAM HOST TARGET GENE, encodes a corresponding messenger RNA, VGAM178 host target RNA, herein designated VGAM HOST TARGET RNA. VGAM178 host target RNA, herein designated VGAM HOST TARGET RNA, comprises three regions, as is typical of mRNA of a protein coding gene: a 5 untranslated region, a protein coding region and a 3 untranslated region, designated 5UTR, PROTEIN CODING and 3UTR respectively.

[2452] VGAM178 RNA, herein designated VGAM RNA, binds complementarily to one or more host target binding sites located in untranslated regions of VGAM178 host target RNA, herein designated VGAM HOST TARGET RNA. This complementary binding is due to the fact that the nucleotide sequence of VGAM178 RNA, herein designated VGAM RNA, is an accurate or a partial inversed-reversed sequence of the nucleotide sequence of each of the host target binding sites. As an illustration, FIG. 1 shows 3 such host target binding sites, designated BINDING SITE I, BINDING SITE II and BINDING SITE III respectively. It is appreciated that the number of host target binding sites shown in FIG. 1 is meant as an illustration only, and is not meant to be limiting VGAM178 RNA, herein designated VGAM RNA, may have a different number of host target binding sites in untranslated regions of a VGAM178 host target RNA, herein designated VGAM HOST TARGET RNA. It is further appreciated that while FIG. 1 depicts host target binding sites in the 3UTR region, this is meant as an example only these host target binding sites may be located in the 3UTR region, the 5UTR region, or in both 3UTR and 5UTR regions.

[2453] The complementary binding of VGAM178 RNA, herein designated VGAM RNA, to host target binding sites on VGAM178 host target RNA, herein designated VGAM HOST TARGET RNA, such as BINDING SITE I, BINDING SITE II and BINDING SITE III, inhibits translation of VGAM178 host target RNA, herein designated VGAM HOST TARGET RNA, into VGAM178 host target protein, herein designated VGAM HOST TARGET PROTEIN. VGAM host target protein is therefore outlined by a broken line.

[2454] It is appreciated that VGAM178 host target gene, herein designated VGAM HOST TARGET GENE, in fact represents a plurality of VGAM178 host target genes. The mRNA of each one of this plurality of VGAM178 host target genes comprises one or more host target binding sites, each having a nucleotide sequence which is at least partly complementary to VGAM178 RNA, herein designated VGAM RNA, and which when bound by VGAM178 RNA, herein designated VGAM RNA, causes inhibition of translation of respective one or more VGAM178 host target proteins.

[2455] It is further appreciated by one skilled in the art that the mode of translational inhibition illustrated by FIG. 1 with specific reference to translational inhibition exerted by VGAM178 gene, herein designated VGAM GENE, on one or more VGAM178 host target gene, herein designated VGAM HOST TARGET GENE, is in fact common to other known non-viral miRNA genes. As mentioned hereinabove with reference to the background section, although a specific complementary binding site has been demonstrated only for some of the known miRNA genes (primarily Lin-4 and Let-7), all other recently discovered miRNA genes are also believed by those skilled in the art to modulate expression of other genes by complementary binding, although specific complementary binding sites of these other miRNA genes have not yet been found (Ruvkun G., Perspective: Glimpses of a tiny RNA world, Science 294, 779 (2001)).

[2456] It is yet further appreciated that a function of VGAM178 is inhibition of expression of host target genes, as part of a novel viral mechanism of attacking a host. Accordingly, utilities of VGAM178 include diagnosis, prevention and treatment of viral infection by Vaccinia virus. Specific functions, and accordingly utilities, of VGAM178 correlate with, and may be deduced from, the identity of the host target genes which VGAM178 binds and inhibits, and the function of these host target genes, as elaborated hereinbelow.

[2457] Nucleotide sequences of the VGAM178 precursor RNA, herein designated VGAM PRECURSOR RNA, and of the diced VGAM178 RNA, herein designated VGAM RNA, and a schematic representation of the secondary folding of VGAM178 folded precursor RNA, herein designated VGAM FOLDED PRECURSOR RNA, of VGAM178 are further described hereinbelow with reference to Table 1.

[2458] Nucleotide sequences of host target binding sites, such as BINDING SITE-I, BINDING SITE-II and BINDING SITE-III of FIG. 1, found on, and schematic representation of the complementarity of each of these host target binding sites to VGAM178 RNA, herein designated VGAM RNA, are described hereinbelow with reference to Table 2.

[2459] FIG. 1 further provides a conceptual description of another novel bioinformatically detected viral gene of the present invention, referred to here as Viral Genomic Address Messenger 179 (VGAM179) viral gene, which modulates expression of respective host target genes thereof, the function and utility of which host target genes is known in the art.

[2460] VGAM179 is a novel bioinformatically detected regulatory, non protein coding, viral micro RNA (miRNA) gene. The method by which VGAM179 was detected is described hereinabove with reference to FIGS. 2-8.

[2461] VGAM179 gene, herein designated VGAM GENE, is a viral gene contained in the genome of Vaccinia virus. VGAM179 host target gene, herein designated VGAM HOST TARGET GENE, is a human gene contained in the human genome.

[2462] VGAM179 gene, herein designated VGAM GENE, encodes a VGAM179 precursor RNA, herein designated VGAM PRECURSOR RNA. Similar to other miRNA genes, and unlike most ordinary genes, VGAM179 precursor RNA, herein designated VGAM PRECURSOR RNA, does not encode a protein. A nucleotide sequence identical or highly similar to the nucleotide sequence of VGAM179 precursor RNA is designated SEQ ID:165, and is provided hereinbelow with reference to the sequence listing part. Nucleotide sequence SEQ ID: 165 is located at position 92769 relative to the genome of Vaccinia virus.

[2463] VGAM179 precursor RNA, herein designated VGAM PRECURSOR RNA, folds onto itself, forming VGAM179 folded precursor RNA, herein designated VGAM FOLDED PRECURSOR RNA, which has a two-dimensional hairpin structure. As is well known in the art, this hairpin structure, is typical of RNA encoded by miRNA genes, and is due to the fact that the nucleotide sequence of the first half of the RNA encoded by a miRNA gene is an accurate or partial inversed-reversed sequence of the nucleotide sequence of the second half thereof.

[2464] An enzyme complex designated DICER COMPLEX, dices the VGAM179 folded precursor RNA, herein designated VGAM FOLDED PRECURSOR RNA, into VGAM179 RNA, herein designated VGAM RNA, a single stranded ˜22 nt long RNA segment. As is known in the art, dicing of a hairpin structured RNA precursor product into a short ˜22 nt RNA segment is catalyzed by an enzyme complex comprising an enzyme called Dicer together with other necessary proteins. A probable (over 92%) nucleotide sequence of VGAM179 RNA is designated SEQ ID:514, and is provided hereinbelow with reference to the sequence listing part.

[2465] VGAM179 host target gene, herein designated VGAM HOST TARGET GENE, encodes a corresponding messenger RNA, VGAM179 host target RNA, herein designated VGAM HOST TARGET RNA. VGAM179 host target RNA, herein designated VGAM HOST TARGET RNA, comprises three regions, as is typical of mRNA of a protein coding gene: a 5 untranslated region, a protein coding region and a 3 untranslated region, designated 5UTR, PROTEIN CODING and 3UTR respectively.

[2466] VGAM179 RNA, herein designated VGAM RNA, binds complementarily to one or more host target binding sites located in untranslated regions of VGAM179 host target RNA, herein designated VGAM HOST TARGET RNA. This complementary binding is due to the fact that the nucleotide sequence of VGAM179 RNA, herein designated VGAM RNA, is an accurate or a partial inversed-reversed sequence of the nucleotide sequence of each of the host target binding sites. As an illustration, FIG. 1 shows 3 such host target binding sites, designated BINDING SITE I, BINDING SITE II and BINDING SITE III respectively. It is appreciated that the number of host target binding sites shown in FIG. 1 is meant as an illustration only, and is not meant to be limiting VGAM179 RNA, herein designated VGAM RNA, may have a different number of host target binding sites in untranslated regions of a VGAM179 host target RNA, herein designated VGAM HOST TARGET RNA. It is further appreciated that while FIG. 1 depicts host target binding sites in the 3UTR region, this is meant as an example only these host target binding sites may be located in the 3UTR region, the 5UTR region, or in both 3UTR and 5UTR regions.

[2467] The complementary binding of VGAM179 RNA, herein designated VGAM RNA, to host target binding sites on VGAM179 host target RNA, herein designated VGAM HOST TARGET RNA, such as BINDING SITE I, BINDING SITE II and BINDING SITE III, inhibits translation of VGAM179 host target RNA, herein designated VGAM HOST TARGET RNA, into VGAM179 host target protein, herein designated VGAM HOST TARGET PROTEIN. VGAM host target protein is therefore outlined by a broken line.

[2468] It is appreciated that VGAM179 host target gene, herein designated VGAM HOST TARGET GENE, in fact represents a plurality of VGAM179 host target genes. The mRNA of each one of this plurality of VGAM179 host target genes comprises one or more host target binding sites, each having a nucleotide sequence which is at least partly complementary to VGAM179 RNA, herein designated VGAM RNA, and which when bound by VGAM179 RNA, herein designated VGAM RNA, causes inhibition of translation of respective one or more VGAM179 host target proteins.

[2469] It is further appreciated by one skilled in the art that the mode of translational inhibition illustrated by FIG. 1 with specific reference to translational inhibition exerted by VGAM179 gene, herein designated VGAM GENE, on one or more VGAM179 host target gene, herein designated VGAM HOST TARGET GENE, is in fact common to other known non-viral miRNA genes. As mentioned hereinabove with reference to the background section, although a specific complementary binding site has been demonstrated only for some of the known miRNA genes (primarily Lin-4 and Let-7), all other recently discovered miRNA genes are also believed by those skilled in the art to modulate expression of other genes by complementary binding, although specific complementary binding sites of these other miRNA genes have not yet been found (Ruvkun G., Perspective: Glimpses of a tiny RNA world, Science 294, 779 (2001)).

[2470] It is yet further appreciated that a function of VGAM179 is inhibition of expression of host target genes, as part of a novel viral mechanism of attacking a host. Accordingly, utilities of VGAM179 include diagnosis, prevention and treatment of viral infection by Vaccinia virus. Specific functions, and accordingly utilities, of VGAM179 correlate with, and may be deduced from, the identity of the host target genes which VGAM179 binds and inhibits, and the function of these host target genes, as elaborated hereinbelow.

[2471] Nucleotide sequences of the VGAM179 precursor RNA, herein designated VGAM PRECURSOR RNA, and of the diced VGAM179 RNA, herein designated VGAM RNA, and a schematic representation of the secondary folding of VGAM179 folded precursor RNA, herein designated VGAM FOLDED PRECURSOR RNA, of VGAM179 are further described hereinbelow with reference to Table 1.

[2472] Nucleotide sequences of host target binding sites, such as BINDING SITE-I, BINDING SITE-II and BINDING SITE-III of FIG. 1, found on, and schematic representation of the complementarity of each of these host target binding sites to VGAM179 RNA, herein designated VGAM RNA, are described hereinbelow with reference to Table 2.

[2473] FIG. 1 further provides a conceptual description of another novel bioinformatically detected viral gene of the present invention, referred to here as Viral Genomic Address Messenger 180 (VGAM180) viral gene, which modulates expression of respective host target genes thereof, the function and utility of which host target genes is known in the art.

[2474] VGAM180 is a novel bioinformatically detected regulatory, non protein coding, viral micro RNA (miRNA) gene. The method by which VGAM180 was detected is described hereinabove with reference to FIGS. 2-8.

[2475] VGAM180 gene, herein designated VGAM GENE, is a viral gene contained in the genome of Vaccinia virus. VGAM180 host target gene, herein designated VGAM HOST TARGET GENE, is a human gene contained in the human genome.

[2476] VGAM180 gene, herein designated VGAM GENE, encodes a VGAM180 precursor RNA, herein designated VGAM PRECURSOR RNA. Similar to other miRNA genes, and unlike most ordinary genes, VGAM180 precursor RNA, herein designated VGAM PRECURSOR RNA, does not encode a protein. A nucleotide sequence identical or highly similar to the nucleotide sequence of VGAM180 precursor RNA is designated SEQ ID:166, and is provided hereinbelow with reference to the sequence listing part. Nucleotide sequence SEQ ID: 166 is located at position 93665 relative to the genome of Vaccinia virus.

[2477] VGAM180 precursor RNA, herein designated VGAM PRECURSOR RNA, folds onto itself, forming VGAM180 folded precursor RNA, herein designated VGAM FOLDED PRECURSOR RNA, which has a two-dimensional hairpin structure. As is well known in the art, this hairpin structure, is typical of RNA encoded by miRNA genes, and is due to the fact that the nucleotide sequence of the first half of the RNA encoded by a miRNA gene is an accurate or partial inversed-reversed sequence of the nucleotide sequence of the second half thereof.

[2478] An enzyme complex designated DICER COMPLEX, dices the VGAM180 folded precursor RNA, herein designated VGAM FOLDED PRECURSOR RNA, into VGAM180 RNA, herein designated VGAM RNA, a single stranded ˜22 nt long RNA segment. As is known in the art, dicing of a hairpin structured RNA precursor product into a short ˜22 nt RNA segment is catalyzed by an enzyme complex comprising an enzyme called Dicer together with other necessary proteins. A probable (over 71%) nucleotide sequence of VGAM180 RNA is designated SEQ ID:515, and is provided hereinbelow with reference to the sequence listing part.

[2479] VGAM180 host target gene, herein designated VGAM HOST TARGET GENE, encodes a corresponding messenger RNA, VGAM180 host target RNA, herein designated VGAM HOST TARGET RNA. VGAM180 host target RNA, herein designated VGAM HOST TARGET RNA, comprises three regions, as is typical of mRNA of a protein coding gene: a 5 untranslated region, a protein coding region and a 3 untranslated region, designated 5UTR, PROTEIN CODING and 3UTR respectively.

[2480] VGAM180 RNA, herein designated VGAM RNA, binds complementarily to one or more host target binding sites located in untranslated regions of VGAM180 host target RNA, herein designated VGAM HOST TARGET RNA. This complementary binding is due to the fact that the nucleotide sequence of VGAM180 RNA, herein designated VGAM RNA, is an accurate or a partial inversed-reversed sequence of the nucleotide sequence of each of the host target binding sites. As an illustration, FIG. 1 shows 3 such host target binding sites, designated BINDING SITE I, BINDING SITE II and BINDING SITE III respectively. It is appreciated that the number of host target binding sites shown in FIG. 1 is meant as an illustration only, and is not meant to be limiting VGAM180 RNA, herein designated VGAM RNA, may have a different number of host target binding sites in untranslated regions of a VGAM180 host target RNA, herein designated VGAM HOST TARGET RNA. It is further appreciated that while FIG. 1 depicts host target binding sites in the 3UTR region, this is meant as an example only these host target binding sites may be located in the 3UTR region, the 5UTR region, or in both 3UTR and 5UTR regions.

[2481] The complementary binding of VGAM180 RNA, herein designated VGAM RNA, to host target binding sites on VGAM180 host target RNA, herein designated VGAM HOST TARGET RNA, such as BINDING SITE I, BINDING SITE II and BINDING SITE III, inhibits translation of VGAM180 host target RNA, herein designated VGAM HOST TARGET RNA, into VGAM180 host target protein, herein designated VGAM HOST TARGET PROTEIN. VGAM host target protein is therefore outlined by a broken line.

[2482] It is appreciated that VGAM180 host target gene, herein designated VGAM HOST TARGET GENE, in fact represents a plurality of VGAM180 host target genes. The mRNA of each one of this plurality of VGAM180 host target genes comprises one or more host target binding sites, each having a nucleotide sequence which is at least partly complementary to VGAM180 RNA, herein designated VGAM RNA, and which when bound by VGAM180 RNA, herein designated VGAM RNA, causes inhibition of translation of respective one or more VGAM180 host target proteins.

[2483] It is further appreciated by one skilled in the art that the mode of translational inhibition illustrated by FIG. 1 with specific reference to translational inhibition exerted by VGAM180 gene, herein designated VGAM GENE, on one or more VGAM180 host target gene, herein designated VGAM HOST TARGET GENE, is in fact common to other known non-viral miRNA genes. As mentioned hereinabove with reference to the background section, although a specific complementary binding site has been demonstrated only for some of the known miRNA genes (primarily Lin-4 and Let-7), all other recently discovered miRNA genes are also believed by those skilled in the art to modulate expression of other genes by complementary binding, although specific complementary binding sites of these other miRNA genes have not yet been found (Ruvkun G., Perspective: Glimpses of a tiny RNA world, Science 294, 779 (2001)).

[2484] It is yet further appreciated that a function of VGAM180 is inhibition of expression of host target genes, as part of a novel viral mechanism of attacking a host. Accordingly, utilities of VGAM180 include diagnosis, prevention and treatment of viral infection by Vaccinia virus. Specific functions, and accordingly utilities, of VGAM180 correlate with, and may be deduced from, the identity of the host target genes which VGAM180 binds and inhibits, and the function of these host target genes, as elaborated hereinbelow.

[2485] Nucleotide sequences of the VGAM180 precursor RNA, herein designated VGAM PRECURSOR RNA, and of the diced VGAM180 RNA, herein designated VGAM RNA, and a schematic representation of the secondary folding of VGAM180 folded precursor RNA, herein designated VGAM FOLDED PRECURSOR RNA, of VGAM180 are further described hereinbelow with reference to Table 1.

[2486] Nucleotide sequences of host target binding sites, such as BINDING SITE-I, BINDING SITE-II and BINDING SITE-III of FIG. 1, found on, and schematic representation of the complementarity of each of these host target binding sites to VGAM180 RNA, herein designated VGAM RNA, are described hereinbelow with reference to Table 2.

[2487] FIG. 1 further provides a conceptual description of another novel bioinformatically detected viral gene of the present invention, referred to here as Viral Genomic Address Messenger 181 (VGAM181) viral gene, which modulates expression of respective host target genes thereof, the function and utility of which host target genes is known in the art.

[2488] VGAM181 is a novel bioinformatically detected regulatory, non protein coding, viral micro RNA (miRNA) gene. The method by which VGAM181 was detected is described hereinabove with reference to FIGS. 2-8.

[2489] VGAM181 gene, herein designated VGAM GENE, is a viral gene contained in the genome of Vaccinia virus. VGAM181 host target gene, herein designated VGAM HOST TARGET GENE, is a human gene contained in the human genome.

[2490] VGAM181 gene, herein designated VGAM GENE, encodes a VGAM181 precursor RNA, herein designated VGAM PRECURSOR RNA. Similar to other miRNA genes, and unlike most ordinary genes, VGAM181 precursor RNA, herein designated VGAM PRECURSOR RNA, does not encode a protein. A nucleotide sequence identical or highly similar to the nucleotide sequence of VGAM181 precursor RNA is designated SEQ ID:167, and is provided hereinbelow with reference to the sequence listing part. Nucleotide sequence SEQ ID: 167 is located at position 96078 relative to the genome of Vaccinia virus.

[2491] VGAM181 precursor RNA, herein designated VGAM PRECURSOR RNA, folds onto itself, forming VGAM181 folded precursor RNA, herein designated VGAM FOLDED PRECURSOR RNA, which has a two-dimensional hairpin structure. As is well known in the art, this hairpin structure, is typical of RNA encoded by miRNA genes, and is due to the fact that the nucleotide sequence of the first half of the RNA encoded by a miRNA gene is an accurate or partial inversed-reversed sequence of the nucleotide sequence of the second half thereof.

[2492] An enzyme complex designated DICER COMPLEX, dices the VGAM181 folded precursor RNA, herein designated VGAM FOLDED PRECURSOR RNA, into VGAM181 RNA, herein designated VGAM RNA, a single stranded ˜22 nt long RNA segment. As is known in the art, dicing of a hairpin structured RNA precursor product into a short ˜22 nt RNA segment is catalyzed by an enzyme complex comprising an enzyme called Dicer together with other necessary proteins. A probable (over 80%) nucleotide sequence of VGAM181 RNA is designated SEQ ID:516, and is provided hereinbelow with reference to the sequence listing part.

[2493] VGAM181 host target gene, herein designated VGAM HOST TARGET GENE, encodes a corresponding messenger RNA, VGAM181 host target RNA, herein designated VGAM HOST TARGET RNA. VGAM181 host target RNA, herein designated VGAM HOST TARGET RNA, comprises three regions, as is typical of mRNA of a protein coding gene: a 5 untranslated region, a protein coding region and a 3 untranslated region, designated 5UTR, PROTEIN CODING and 3UTR respectively.

[2494] VGAM181 RNA, herein designated VGAM RNA, binds complementarily to one or more host target binding sites located in untranslated regions of VGAM181 host target RNA, herein designated VGAM HOST TARGET RNA. This complementary binding is due to the fact that the nucleotide sequence of VGAM181 RNA, herein designated VGAM RNA, is an accurate or a partial inversed-reversed sequence of the nucleotide sequence of each of the host target binding sites. As an illustration, FIG. 1 shows 3 such host target binding sites, designated BINDING SITE I, BINDING SITE II and BINDING SITE III respectively. It is appreciated that the number of host target binding sites shown in FIG. 1 is meant as an illustration only, and is not meant to be limiting VGAM181 RNA, herein designated VGAM RNA, may have a different number of host target binding sites in untranslated regions of a VGAM181 host target RNA, herein designated VGAM HOST TARGET RNA. It is further appreciated that while FIG. 1 depicts host target binding sites in the 3UTR region, this is meant as an example only these host target binding sites may be located in the 3UTR region, the 5UTR region, or in both 3UTR and 5UTR regions.

[2495] The complementary binding of VGAM181 RNA, herein designated VGAM RNA, to host target binding sites on VGAM181 host target RNA, herein designated VGAM HOST TARGET RNA, such as BINDING SITE I, BINDING SITE II and BINDING SITE III, inhibits translation of VGAM181 host target RNA, herein designated VGAM HOST TARGET RNA, into VGAM181 host target protein, herein designated VGAM HOST TARGET PROTEIN. VGAM host target protein is therefore outlined by a broken line.

[2496] It is appreciated that VGAM181 host target gene, herein designated VGAM HOST TARGET GENE, in fact represents a plurality of VGAM181 host target genes. The mRNA of each one of this plurality of VGAM181 host target genes comprises one or more host target binding sites, each having a nucleotide sequence which is at least partly complementary to VGAM181 RNA, herein designated VGAM RNA, and which when bound by VGAM181 RNA, herein designated VGAM RNA, causes inhibition of translation of respective one or more VGAM181 host target proteins.

[2497] It is further appreciated by one skilled in the art that the mode of translational inhibition illustrated by FIG. 1 with specific reference to translational inhibition exerted by VGAM181 gene, herein designated VGAM GENE, on one or more VGAM181 host target gene, herein designated VGAM HOST TARGET GENE, is in fact common to other known non-viral miRNA genes. As mentioned hereinabove with reference to the background section, although a specific complementary binding site has been demonstrated only for some of the known miRNA genes (primarily Lin-4 and Let-7), all other recently discovered miRNA genes are also believed by those skilled in the art to modulate expression of other genes by complementary binding, although specific complementary binding sites of these other miRNA genes have not yet been found (Ruvkun G., Perspective: Glimpses of a tiny RNA world, Science 294, 779 (2001)).

[2498] It is yet further appreciated that a function of VGAM181 is inhibition of expression of host target genes, as part of a novel viral mechanism of attacking a host. Accordingly, utilities of VGAM181 include diagnosis, prevention and treatment of viral infection by Vaccinia virus. Specific functions, and accordingly utilities, of VGAM181 correlate with, and may be deduced from, the identity of the host target genes which VGAM181 binds and inhibits, and the function of these host target genes, as elaborated hereinbelow.

[2499] Nucleotide sequences of the VGAM181 precursor RNA, herein designated VGAM PRECURSOR RNA, and of the diced VGAM181 RNA, herein designated VGAM RNA, and a schematic representation of the secondary folding of VGAM181 folded precursor RNA, herein designated VGAM FOLDED PRECURSOR RNA, of VGAM181 are further described hereinbelow with reference to Table 1.

[2500] Nucleotide sequences of host target binding sites, such as BINDING SITE-I, BINDING SITE-II and BINDING SITE-III of FIG. 1, found on, and schematic representation of the complementarity of each of these host target binding sites to VGAM181 RNA, herein designated VGAM RNA, are described hereinbelow with reference to Table 2.

[2501] FIG. 1 further provides a conceptual description of another novel bioinformatically detected viral gene of the present invention, referred to here as Viral Genomic Address Messenger 182 (VGAM182) viral gene, which modulates expression of respective host target genes thereof, the function and utility of which host target genes is known in the art.

[2502] VGAM182 is a novel bioinformatically detected regulatory, non protein coding, viral micro RNA (miRNA) gene. The method by which VGAM182 was detected is described hereinabove with reference to FIGS. 2-8.

[2503] VGAM182 gene, herein designated VGAM GENE, is a viral gene contained in the genome of Vaccinia virus. VGAM182 host target gene, herein designated VGAM HOST TARGET GENE, is a human gene contained in the human genome.

[2504] VGAM182 gene, herein designated VGAM GENE, encodes a VGAM182 precursor RNA, herein designated VGAM PRECURSOR RNA. Similar to other miRNA genes, and unlike most ordinary genes, VGAM182 precursor RNA, herein designated VGAM PRECURSOR RNA, does not encode a protein. A nucleotide sequence identical or highly similar to the nucleotide sequence of VGAM182 precursor RNA is designated SEQ ID:168, and is provided hereinbelow with reference to the sequence listing part. Nucleotide sequence SEQ ID: 168 is located at position 96777 relative to the genome of Vaccinia virus.

[2505] VGAM182 precursor RNA, herein designated VGAM PRECURSOR RNA, folds onto itself, forming VGAM182 folded precursor RNA, herein designated VGAM FOLDED PRECURSOR RNA, which has a two-dimensional hairpin structure. As is well known in the art, this hairpin structure, is typical of RNA encoded by miRNA genes, and is due to the fact that the nucleotide sequence of the first half of the RNA encoded by a miRNA gene is an accurate or partial inversed-reversed sequence of the nucleotide sequence of the second half thereof.

[2506] An enzyme complex designated DICER COMPLEX, dices the VGAM182 folded precursor RNA, herein designated VGAM FOLDED PRECURSOR RNA, into VGAM182 RNA, herein designated VGAM RNA, a single stranded ˜22 nt long RNA segment. As is known in the art, dicing of a hairpin structured RNA precursor product into a short ˜22 nt RNA segment is catalyzed by an enzyme complex comprising an enzyme called Dicer together with other necessary proteins. A probable (over 78%) nucleotide sequence of VGAM182 RNA is designated SEQ ID:517, and is provided hereinbelow with reference to the sequence listing part.

[2507] VGAM182 host target gene, herein designated VGAM HOST TARGET GENE, encodes a corresponding messenger RNA, VGAM182 host target RNA, herein designated VGAM HOST TARGET RNA. VGAM182 host target RNA, herein designated VGAM HOST TARGET RNA, comprises three regions, as is typical of mRNA of a protein coding gene: a 5 untranslated region, a protein coding region and a 3 untranslated region, designated 5UTR, PROTEIN CODING and 3UTR respectively.

[2508] VGAM182 RNA, herein designated VGAM RNA, binds complementarily to one or more host target binding sites located in untranslated regions of VGAM182 host target RNA, herein designated VGAM HOST TARGET RNA. This complementary binding is due to the fact that the nucleotide sequence of VGAM182 RNA, herein designated VGAM RNA, is an accurate or a partial inversed-reversed sequence of the nucleotide sequence of each of the host target binding sites. As an illustration, FIG. 1 shows 3 such host target binding sites, designated BINDING SITE I, BINDING SITE II and BINDING SITE III respectively. It is appreciated that the number of host target binding sites shown in FIG. 1 is meant as an illustration only, and is not meant to be limiting VGAM182 RNA, herein designated VGAM RNA, may have a different number of host target binding sites in untranslated regions of a VGAM182 host target RNA, herein designated VGAM HOST TARGET RNA. It is further appreciated that while FIG. 1 depicts host target binding sites in the 3UTR region, this is meant as an example only these host target binding sites may be located in the 3UTR region, the 5UTR region, or in both 3UTR and 5UTR regions.

[2509] The complementary binding of VGAM182 RNA, herein designated VGAM RNA, to host target binding sites on VGAM182 host target RNA, herein designated VGAM HOST TARGET RNA, such as BINDING SITE I, BINDING SITE II and BINDING SITE III, inhibits translation of VGAM182 host target RNA, herein designated VGAM HOST TARGET RNA, into VGAM182 host target protein, herein designated VGAM HOST TARGET PROTEIN. VGAM host target protein is therefore outlined by a broken line.

[2510] It is appreciated that VGAM182 host target gene, herein designated VGAM HOST TARGET GENE, in fact represents a plurality of VGAM182 host target genes. The mRNA of each one of this plurality of VGAM182 host target genes comprises one or more host target binding sites, each having a nucleotide sequence which is at least partly complementary to VGAM182 RNA, herein designated VGAM RNA, and which when bound by VGAM182 RNA, herein designated VGAM RNA, causes inhibition of translation of respective one or more VGAM182 host target proteins.

[2511] It is further appreciated by one skilled in the art that the mode of translational inhibition illustrated by FIG. 1 with specific reference to translational inhibition exerted by VGAM182 gene, herein designated VGAM GENE, on one or more VGAM182 host target gene, herein designated VGAM HOST TARGET GENE, is in fact common to other known non-viral miRNA genes. As mentioned hereinabove with reference to the background section, although a specific complementary binding site has been demonstrated only for some of the known miRNA genes (primarily Lin-4 and Let-7), all other recently discovered miRNA genes are also believed by those skilled in the art to modulate expression of other genes by complementary binding, although specific complementary binding sites of these other miRNA genes have not yet been found (Ruvkun G., Perspective: Glimpses of a tiny RNA world, Science 294, 779 (2001)).

[2512] It is yet further appreciated that a function of VGAM182 is inhibition of expression of host target genes, as part of a novel viral mechanism of attacking a host. Accordingly, utilities of VGAM182 include diagnosis, prevention and treatment of viral infection by Vaccinia virus. Specific functions, and accordingly utilities, of VGAM182 correlate with, and may be deduced from, the identity of the host target genes which VGAM182 binds and inhibits, and the function of these host target genes, as elaborated hereinbelow.

[2513] Nucleotide sequences of the VGAM182 precursor RNA, herein designated VGAM PRECURSOR RNA, and of the diced VGAM182 RNA, herein designated VGAM RNA, and a schematic representation of the secondary folding of VGAM182 folded precursor RNA, herein designated VGAM FOLDED PRECURSOR RNA, of VGAM182 are further described hereinbelow with reference to Table 1.

[2514] Nucleotide sequences of host target binding sites, such as BINDING SITE-I, BINDING SITE-II and BINDING SITE-III of FIG. 1, found on, and schematic representation of the complementarity of each of these host target binding sites to VGAM182 RNA, herein designated VGAM RNA, are described hereinbelow with reference to Table 2.

[2515] FIG. 1 further provides a conceptual description of another novel bioinformatically detected viral gene of the present invention, referred to here as Viral Genomic Address Messenger 183 (VGAM183) viral gene, which modulates expression of respective host target genes thereof, the function and utility of which host target genes is known in the art.

[2516] VGAM183 is a novel bioinformatically detected regulatory, non protein coding, viral micro RNA (miRNA) gene. The method by which VGAM183 was detected is described hereinabove with reference to FIGS. 2-8.

[2517] VGAM183 gene, herein designated VGAM GENE, is a viral gene contained in the genome of Vaccinia virus. VGAM183 host target gene, herein designated VGAM HOST TARGET GENE, is a human gene contained in the human genome.

[2518] VGAM183 gene, herein designated VGAM GENE, encodes a VGAM183 precursor RNA, herein designated VGAM PRECURSOR RNA. Similar to other miRNA genes, and unlike most ordinary genes, VGAM183 precursor RNA, herein designated VGAM PRECURSOR RNA, does not encode a protein. A nucleotide sequence identical or highly similar to the nucleotide sequence of VGAM183 precursor RNA is designated SEQ ID:169, and is provided hereinbelow with reference to the sequence listing part. Nucleotide sequence SEQ ID: 169 is located at position 95430 relative to the genome of Vaccinia virus.

[2519] VGAM183 precursor RNA, herein designated VGAM PRECURSOR RNA, folds onto itself, forming VGAM183 folded precursor RNA, herein designated VGAM FOLDED PRECURSOR RNA, which has a two-dimensional hairpin structure. As is well known in the art, this hairpin structure, is typical of RNA encoded by miRNA genes, and is due to the fact that the nucleotide sequence of the first half of the RNA encoded by a miRNA gene is an accurate or partial inversed-reversed sequence of the nucleotide sequence of the second half thereof.

[2520] An enzyme complex designated DICER COMPLEX, dices the VGAM183 folded precursor RNA, herein designated VGAM FOLDED PRECURSOR RNA, into VGAM183 RNA, herein designated VGAM RNA, a single stranded ˜22 nt long RNA segment. As is known in the art, dicing of a hairpin structured RNA precursor product into a short ˜22 nt RNA segment is catalyzed by an enzyme complex comprising an enzyme called Dicer together with other necessary proteins. A probable (over 72%) nucleotide sequence of VGAM183 RNA is designated SEQ ID:518, and is provided hereinbelow with reference to the sequence listing part.

[2521] VGAM183 host target gene, herein designated VGAM HOST TARGET GENE, encodes a corresponding messenger RNA, VGAM183 host target RNA, herein designated VGAM HOST TARGET RNA. VGAM183 host target RNA, herein designated VGAM HOST TARGET RNA, comprises three regions, as is typical of mRNA of a protein coding gene: a 5 untranslated region, a protein coding region and a 3 untranslated region, designated 5UTR, PROTEIN CODING and 3UTR respectively.

[2522] VGAM183 RNA, herein designated VGAM RNA, binds complementarily to one or more host target binding sites located in untranslated regions of VGAM183 host target RNA, herein designated VGAM HOST TARGET RNA. This complementary binding is due to the fact that the nucleotide sequence of VGAM183 RNA, herein designated VGAM RNA, is an accurate or a partial inversed-reversed sequence of the nucleotide sequence of each of the host target binding sites. As an illustration, FIG. 1 shows 3 such host target binding sites, designated BINDING SITE I, BINDING SITE II and BINDING SITE III respectively. It is appreciated that the number of host target binding sites shown in FIG. 1 is meant as an illustration only, and is not meant to be limiting VGAM183 RNA, herein designated VGAM RNA, may have a different number of host target binding sites in untranslated regions of a VGAM183 host target RNA, herein designated VGAM HOST TARGET RNA. It is further appreciated that while FIG. 1 depicts host target binding sites in the 3UTR region, this is meant as an example only these host target binding sites may be located in the 3UTR region, the 5UTR region, or in both 3UTR and 5UTR regions.

[2523] The complementary binding of VGAM183 RNA, herein designated VGAM RNA, to host target binding sites on VGAM183 host target RNA, herein designated VGAM HOST TARGET RNA, such as BINDING SITE I, BINDING SITE II and BINDING SITE III, inhibits translation of VGAM183 host target RNA, herein designated VGAM HOST TARGET RNA, into VGAM183 host target protein, herein designated VGAM HOST TARGET PROTEIN. VGAM host target protein is therefore outlined by a broken line.

[2524] It is appreciated that VGAM183 host target gene, herein designated VGAM HOST TARGET GENE, in fact represents a plurality of VGAM183 host target genes. The mRNA of each one of this plurality of VGAM183 host target genes comprises one or more host target binding sites, each having a nucleotide sequence which is at least partly complementary to VGAM183 RNA, herein designated VGAM RNA, and which when bound by VGAM183 RNA, herein designated VGAM RNA, causes inhibition of translation of respective one or more VGAM183 host target proteins.

[2525] It is further appreciated by one skilled in the art that the mode of translational inhibition illustrated by FIG. 1 with specific reference to translational inhibition exerted by VGAM183 gene, herein designated VGAM GENE, on one or more VGAM183 host target gene, herein designated VGAM HOST TARGET GENE, is in fact common to other known non-viral miRNA genes. As mentioned hereinabove with reference to the background section, although a specific complementary binding site has been demonstrated only for some of the known miRNA genes (primarily Lin-4 and Let-7), all other recently discovered miRNA genes are also believed by those skilled in the art to modulate expression of other genes by complementary binding, although specific complementary binding sites of these other miRNA genes have not yet been found (Ruvkun G., Perspective: Glimpses of a tiny RNA world, Science 294, 779 (2001)).

[2526] It is yet further appreciated that a function of VGAM183 is inhibition of expression of host target genes, as part of a novel viral mechanism of attacking a host. Accordingly, utilities of VGAM183 include diagnosis, prevention and treatment of viral infection by Vaccinia virus. Specific functions, and accordingly utilities, of VGAM183 correlate with, and may be deduced from, the identity of the host target genes which VGAM183 binds and inhibits, and the function of these host target genes, as elaborated hereinbelow.

[2527] Nucleotide sequences of the VGAM183 precursor RNA, herein designated VGAM PRECURSOR RNA, and of the diced VGAM183 RNA, herein designated VGAM RNA, and a schematic representation of the secondary folding of VGAM183 folded precursor RNA, herein designated VGAM FOLDED PRECURSOR RNA, of VGAM183 are further described hereinbelow with reference to Table 1.

[2528] Nucleotide sequences of host target binding sites, such as BINDING SITE-I, BINDING SITE-II and BINDING SITE-III of FIG. 1, found on, and schematic representation of the complementarity of each of these host target binding sites to VGAM183 RNA, herein designated VGAM RNA, are described hereinbelow with reference to Table 2.

[2529] FIG. 1 further provides a conceptual description of another novel bioinformatically detected viral gene of the present invention, referred to here as Viral Genomic Address Messenger 184 (VGAM184) viral gene, which modulates expression of respective host target genes thereof, the function and utility of which host target genes is known in the art.

[2530] VGAM184 is a novel bioinformatically detected regulatory, non protein coding, viral micro RNA (miRNA) gene. The method by which VGAM184 was detected is described hereinabove with reference to FIGS. 2-8.

[2531] VGAM184 gene, herein designated VGAM GENE, is a viral gene contained in the genome of Vaccinia virus. VGAM184 host target gene, herein designated VGAM HOST TARGET GENE, is a human gene contained in the human genome.

[2532] VGAM184 gene, herein designated VGAM GENE, encodes a VGAM184 precursor RNA, herein designated VGAM PRECURSOR RNA. Similar to other miRNA genes, and unlike most ordinary genes, VGAM184 precursor RNA, herein designated VGAM PRECURSOR RNA, does not encode a protein. A nucleotide sequence identical or highly similar to the nucleotide sequence of VGAM184 precursor RNA is designated SEQ ID:170, and is provided hereinbelow with reference to the sequence listing part. Nucleotide sequence SEQ ID:170 is located at position 95224 relative to the genome of Vaccinia virus.

[2533] VGAM184 precursor RNA, herein designated VGAM PRECURSOR RNA, folds onto itself, forming VGAM184 folded precursor RNA, herein designated VGAM FOLDED PRECURSOR RNA, which has a two-dimensional hairpin structure. As is well known in the art, this hairpin structure, is typical of RNA encoded by miRNA genes, and is due to the fact that the nucleotide sequence of the first half of the RNA encoded by a miRNA gene is an accurate or partial inversed-reversed sequence of the nucleotide sequence of the second half thereof.

[2534] An enzyme complex designated DICER COMPLEX, dices the VGAM184 folded precursor RNA, herein designated VGAM FOLDED PRECURSOR RNA, into VGAM184 RNA, herein designated VGAM RNA, a single stranded ˜22 nt long RNA segment. As is known in the art, dicing of a hairpin structured RNA precursor product into a short ˜22 nt RNA segment is catalyzed by an enzyme complex comprising an enzyme called Dicer together with other necessary proteins. A probable (over 89%) nucleotide sequence of VGAM184 RNA is designated SEQ ID:519, and is provided hereinbelow with reference to the sequence listing part.

[2535] VGAM184 host target gene, herein designated VGAM HOST TARGET GENE, encodes a corresponding messenger RNA, VGAM184 host target RNA, herein designated VGAM HOST TARGET RNA. VGAM184 host target RNA, herein designated VGAM HOST TARGET RNA, comprises three regions, as is typical of mRNA of a protein coding gene: a 5 untranslated region, a protein coding region and a 3 untranslated region, designated 5UTR, PROTEIN CODING and 3UTR respectively.

[2536] VGAM184 RNA, herein designated VGAM RNA, binds complementarily to one or more host target binding sites located in untranslated regions of VGAM184 host target RNA, herein designated VGAM HOST TARGET RNA. This complementary binding is due to the fact that the nucleotide sequence of VGAM184 RNA, herein designated VGAM RNA, is an accurate or a partial inversed-reversed sequence of the nucleotide sequence of each of the host target binding sites. As an illustration, FIG. 1 shows 3 such host target binding sites, designated BINDING SITE I, BINDING SITE II and BINDING SITE III respectively. It is appreciated that the number of host target binding sites shown in FIG. 1 is meant as an illustration only, and is not meant to be limiting VGAM184 RNA, herein designated VGAM RNA, may have a different number of host target binding sites in untranslated regions of a VGAM184 host target RNA, herein designated VGAM HOST TARGET RNA. It is further appreciated that while FIG. 1 depicts host target binding sites in the 3UTR region, this is meant as an example only these host target binding sites may be located in the 3UTR region, the 5UTR region, or in both 3UTR and 5UTR regions.

[2537] The complementary binding of VGAM184 RNA, herein designated VGAM RNA, to host target binding sites on VGAM184 host target RNA, herein designated VGAM HOST TARGET RNA, such as BINDING SITE I, BINDING SITE II and BINDING SITE III, inhibits translation of VGAM184 host target RNA, herein designated VGAM HOST TARGET RNA, into VGAM184 host target protein, herein designated VGAM HOST TARGET PROTEIN. VGAM host target protein is therefore outlined by a broken line.

[2538] It is appreciated that VGAM184 host target gene, herein designated VGAM HOST TARGET GENE, in fact represents a plurality of VGAM184 host target genes. The mRNA of each one of this plurality of VGAM184 host target genes comprises one or more host target binding sites, each having a nucleotide sequence which is at least partly complementary to VGAM184 RNA, herein designated VGAM RNA, and which when bound by VGAM184 RNA, herein designated VGAM RNA, causes inhibition of translation of respective one or more VGAM184 host target proteins.

[2539] It is further appreciated by one skilled in the art that the mode of translational inhibition illustrated by FIG. 1 with specific reference to translational inhibition exerted by VGAM184 gene, herein designated VGAM GENE, on one or more VGAM184 host target gene, herein designated VGAM HOST TARGET GENE, is in fact common to other known non-viral miRNA genes. As mentioned hereinabove with reference to the background section, although a specific complementary binding site has been demonstrated only for some of the known miRNA genes (primarily Lin-4 and Let-7), all other recently discovered miRNA genes are also believed by those skilled in the art to modulate expression of other genes by complementary binding, although specific complementary binding sites of these other miRNA genes have not yet been found (Ruvkun G., Perspective: Glimpses of a tiny RNA world, Science 294, 779 (2001)).

[2540] It is yet further appreciated that a function of VGAM184 is inhibition of expression of host target genes, as part of a novel viral mechanism of attacking a host. Accordingly, utilities of VGAM184 include diagnosis, prevention and treatment of viral infection by Vaccinia virus. Specific functions, and accordingly utilities, of VGAM184 correlate with, and may be deduced from, the identity of the host target genes which VGAM184 binds and inhibits, and the function of these host target genes, as elaborated hereinbelow.

[2541] Nucleotide sequences of the VGAM184 precursor RNA, herein designated VGAM PRECURSOR RNA, and of the diced VGAM184 RNA, herein designated VGAM RNA, and a schematic representation of the secondary folding of VGAM184 folded precursor RNA, herein designated VGAM FOLDED PRECURSOR RNA, of VGAM184 are further described hereinbelow with reference to Table 1.

[2542] Nucleotide sequences of host target binding sites, such as BINDING SITE-I, BINDING SITE-II and BINDING SITE-III of FIG. 1, found on, and schematic representation of the complementarity of each of these host target binding sites to VGAM184 RNA, herein designated VGAM RNA, are described hereinbelow with reference to Table 2.

[2543] FIG. 1 further provides a conceptual description of another novel bioinformatically detected viral gene of the present invention, referred to here as Viral Genomic Address Messenger 185 (VGAM185) viral gene, which modulates expression of respective host target genes thereof, the function and utility of which host target genes is known in the art.

[2544] VGAM185 is a novel bioinformatically detected regulatory, non protein coding, viral micro RNA (miRNA) gene. The method by which VGAM185 was detected is described hereinabove with reference to FIGS. 2-8.

[2545] VGAM185 gene, herein designated VGAM GENE, is a viral gene contained in the genome of Vaccinia virus. VGAM185 host target gene, herein designated VGAM HOST TARGET GENE, is a human gene contained in the human genome.

[2546] VGAM185 gene, herein designated VGAM GENE, encodes a VGAM185 precursor RNA, herein designated VGAM PRECURSOR RNA. Similar to other miRNA genes, and unlike most ordinary genes, VGAM185 precursor RNA, herein designated VGAM PRECURSOR RNA, does not encode a protein. A nucleotide sequence identical or highly similar to the nucleotide sequence of VGAM185 precursor RNA is designated SEQ ID:171, and is provided hereinbelow with reference to the sequence listing part. Nucleotide sequence SEQ ID:171 is located at position 97665 relative to the genome of Vaccinia virus.

[2547] VGAM185 precursor RNA, herein designated VGAM PRECURSOR RNA, folds onto itself, forming VGAM185 folded precursor RNA, herein designated VGAM FOLDED PRECURSOR RNA, which has a two-dimensional hairpin structure. As is well known in the art, this hairpin structure, is typical of RNA encoded by miRNA genes, and is due to the fact that the nucleotide sequence of the first half of the RNA encoded by a miRNA gene is an accurate or partial inversed-reversed sequence of the nucleotide sequence of the second half thereof.

[2548] An enzyme complex designated DICER COMPLEX, dices the VGAM185 folded precursor RNA, herein designated VGAM FOLDED PRECURSOR RNA, into VGAM185 RNA, herein designated VGAM RNA, a single stranded ˜22 nt long RNA segment. As is known in the art, dicing of a hairpin structured RNA precursor product into a short ˜22 nt RNA segment is catalyzed by an enzyme complex comprising an enzyme called Dicer together with other necessary proteins. A probable (over 92%) nucleotide sequence of VGAM185 RNA is designated SEQ ID:520, and is provided hereinbelow with reference to the sequence listing part.

[2549] VGAM185 host target gene, herein designated VGAM HOST TARGET GENE, encodes a corresponding messenger RNA, VGAM185 host target RNA, herein designated VGAM HOST TARGET RNA. VGAM185 host target RNA, herein designated VGAM HOST TARGET RNA, comprises three regions, as is typical of mRNA of a protein coding gene: a 5 untranslated region, a protein coding region and a 3 untranslated region, designated 5UTR, PROTEIN CODING and 3UTR respectively.

[2550] VGAM185 RNA, herein designated VGAM RNA, binds complementarily to one or more host target binding sites located in untranslated regions of VGAM185 host target RNA, herein designated VGAM HOST TARGET RNA. This complementary binding is due to the fact that the nucleotide sequence of VGAM185 RNA, herein designated VGAM RNA, is an accurate or a partial inversed-reversed sequence of the nucleotide sequence of each of the host target binding sites. As an illustration, FIG. 1 shows 3 such host target binding sites, designated BINDING SITE I, BINDING SITE II and BINDING SITE III respectively. It is appreciated that the number of host target binding sites shown in FIG. 1 is meant as an illustration only, and is not meant to be limiting VGAM185 RNA, herein designated VGAM RNA, may have a different number of host target binding sites in untranslated regions of a VGAM185 host target RNA, herein designated VGAM HOST TARGET RNA. It is further appreciated that while FIG. 1 depicts host target binding sites in the 3UTR region, this is meant as an example only these host target binding sites may be located in the 3UTR region, the 5UTR region, or in both 3UTR and 5UTR regions.

[2551] The complementary binding of VGAM185 RNA, herein designated VGAM RNA, to host target binding sites on VGAM185 host target RNA, herein designated VGAM HOST TARGET RNA, such as BINDING SITE I, BINDING SITE II and BINDING SITE III, inhibits translation of VGAM185 host target RNA, herein designated VGAM HOST TARGET RNA, into VGAM185 host target protein, herein designated VGAM HOST TARGET PROTEIN. VGAM host target protein is therefore outlined by a broken line.

[2552] It is appreciated that VGAM185 host target gene, herein designated VGAM HOST TARGET GENE, in fact represents a plurality of VGAM185 host target genes. The mRNA of each one of this plurality of VGAM185 host target genes comprises one or more host target binding sites, each having a nucleotide sequence which is at least partly complementary to VGAM185 RNA, herein designated VGAM RNA, and which when bound by VGAM185 RNA, herein designated VGAM RNA, causes inhibition of translation of respective one or more VGAM185 host target proteins.

[2553] It is further appreciated by one skilled in the art that the mode of translational inhibition illustrated by FIG. 1 with specific reference to translational inhibition exerted by VGAM185 gene, herein designated VGAM GENE, on one or more VGAM185 host target gene, herein designated VGAM HOST TARGET GENE, is in fact common to other known non-viral miRNA genes. As mentioned hereinabove with reference to the background section, although a specific complementary binding site has been demonstrated only for some of the known miRNA genes (primarily Lin-4 and Let-7), all other recently discovered miRNA genes are also believed by those skilled in the art to modulate expression of other genes by complementary binding, although specific complementary binding sites of these other miRNA genes have not yet been found (Ruvkun G., Perspective: Glimpses of a tiny RNA world, Science 294, 779 (2001)).

[2554] It is yet further appreciated that a function of VGAM185 is inhibition of expression of host target genes, as part of a novel viral mechanism of attacking a host. Accordingly, utilities of VGAM185 include diagnosis, prevention and treatment of viral infection by Vaccinia virus. Specific functions, and accordingly utilities, of VGAM185 correlate with, and may be deduced from, the identity of the host target genes which VGAM185 binds and inhibits, and the function of these host target genes, as elaborated hereinbelow.

[2555] Nucleotide sequences of the VGAM185 precursor RNA, herein designated VGAM PRECURSOR RNA, and of the diced VGAM185 RNA, herein designated VGAM RNA, and a schematic representation of the secondary folding of VGAM185 folded precursor RNA, herein designated VGAM FOLDED PRECURSOR RNA, of VGAM185 are further described hereinbelow with reference to Table 1.

[2556] Nucleotide sequences of host target binding sites, such as BINDING SITE-I, BINDING SITE-II and BINDING SITE-III of FIG. 1, found on, and schematic representation of the complementarity of each of these host target binding sites to VGAM185 RNA, herein designated VGAM RNA, are described hereinbelow with reference to Table 2.

[2557] FIG. 1 further provides a conceptual description of another novel bioinformatically detected viral gene of the present invention, referred to here as Viral Genomic Address Messenger 186 (VGAM186) viral gene, which modulates expression of respective host target genes thereof, the function and utility of which host target genes is known in the art.

[2558] VGAM186 is a novel bioinformatically detected regulatory, non protein coding, viral micro RNA (miRNA) gene. The method by which VGAM186 was detected is described hereinabove with reference to FIGS. 2-8.

[2559] VGAM186 gene, herein designated VGAM GENE, is a viral gene contained in the genome of Vaccinia virus. VGAM186 host target gene, herein designated VGAM HOST TARGET GENE, is a human gene contained in the human genome.

[2560] VGAM186 gene, herein designated VGAM GENE, encodes a VGAM186 precursor RNA, herein designated VGAM PRECURSOR RNA. Similar to other miRNA genes, and unlike most ordinary genes, VGAM186 precursor RNA, herein designated VGAM PRECURSOR RNA, does not encode a protein. A nucleotide sequence identical or highly similar to the nucleotide sequence of VGAM186 precursor RNA is designated SEQ ID:172, and is provided hereinbelow with reference to the sequence listing part. Nucleotide sequence SEQ ID:172 is located at position 99100 relative to the genome of Vaccinia virus.

[2561] VGAM186 precursor RNA, herein designated VGAM PRECURSOR RNA, folds onto itself, forming VGAM186 folded precursor RNA, herein designated VGAM FOLDED PRECURSOR RNA, which has a two-dimensional hairpin structure. As is well known in the art, this hairpin structure, is typical of RNA encoded by miRNA genes, and is due to the fact that the nucleotide sequence of the first half of the RNA encoded by a miRNA gene is an accurate or partial inversed-reversed sequence of the nucleotide sequence of the second half thereof.

[2562] An enzyme complex designated DICER COMPLEX, dices the VGAM186 folded precursor RNA, herein designated VGAM FOLDED PRECURSOR RNA, into VGAM186 RNA, herein designated VGAM RNA, a single stranded ˜22 nt long RNA segment. As is known in the art, dicing of a hairpin structured RNA precursor product into a short ˜22 nt RNA segment is catalyzed by an enzyme complex comprising an enzyme called Dicer together with other necessary proteins. A probable (over 94%) nucleotide sequence of VGAM186 RNA is designated SEQ ID:521, and is provided hereinbelow with reference to the sequence listing part.

[2563] VGAM186 host target gene, herein designated VGAM HOST TARGET GENE, encodes a corresponding messenger RNA, VGAM186 host target RNA, herein designated VGAM HOST TARGET RNA. VGAM186 host target RNA, herein designated VGAM HOST TARGET RNA, comprises three regions, as is typical of mRNA of a protein coding gene: a 5 untranslated region, a protein coding region and a 3 untranslated region, designated 5UTR, PROTEIN CODING and 3UTR respectively.

[2564] VGAM186 RNA, herein designated VGAM RNA, binds complementarily to one or more host target binding sites located in untranslated regions of VGAM186 host target RNA, herein designated VGAM HOST TARGET RNA. This complementary binding is due to the fact that the nucleotide sequence of VGAM186 RNA, herein designated VGAM RNA, is an accurate or a partial inversed-reversed sequence of the nucleotide sequence of each of the host target binding sites. As an illustration, FIG. 1 shows 3 such host target binding sites, designated BINDING SITE I, BINDING SITE II and BINDING SITE III respectively. It is appreciated that the number of host target binding sites shown in FIG. 1 is meant as an illustration only, and is not meant to be limiting VGAM186 RNA, herein designated VGAM RNA, may have a different number of host target binding sites in untranslated regions of a VGAM186 host target RNA, herein designated VGAM HOST TARGET RNA. It is further appreciated that while FIG. 1 depicts host target binding sites in the 3UTR region, this is meant as an example only these host target binding sites may be located in the 3UTR region, the 5UTR region, or in both 3UTR and 5UTR regions.

[2565] The complementary binding of VGAM186 RNA, herein designated VGAM RNA, to host target binding sites on VGAM186 host target RNA, herein designated VGAM HOST TARGET RNA, such as BINDING SITE I, BINDING SITE II and BINDING SITE III, inhibits translation of VGAM186 host target RNA, herein designated VGAM HOST TARGET RNA, into VGAM186 host target protein, herein designated VGAM HOST TARGET PROTEIN. VGAM host target protein is therefore outlined by a broken line.

[2566] It is appreciated that VGAM186 host target gene, herein designated VGAM HOST TARGET GENE, in fact represents a plurality of VGAM186 host target genes. The mRNA of each one of this plurality of VGAM186 host target genes comprises one or more host target binding sites, each having a nucleotide sequence which is at least partly complementary to VGAM186 RNA, herein designated VGAM RNA, and which when bound by VGAM186 RNA, herein designated VGAM RNA, causes inhibition of translation of respective one or more VGAM186 host target proteins.

[2567] It is further appreciated by one skilled in the art that the mode of translational inhibition illustrated by FIG. 1 with specific reference to translational inhibition exerted by VGAM186 gene, herein designated VGAM GENE, on one or more VGAM186 host target gene, herein designated VGAM HOST TARGET GENE, is in fact common to other known non-viral miRNA genes. As mentioned hereinabove with reference to the background section, although a specific complementary binding site has been demonstrated only for some of the known miRNA genes (primarily Lin-4 and Let-7), all other recently discovered miRNA genes are also believed by those skilled in the art to modulate expression of other genes by complementary binding, although specific complementary binding sites of these other miRNA genes have not yet been found (Ruvkun G., Perspective: Glimpses of a tiny RNA world, Science 294, 779 (2001)).

[2568] It is yet further appreciated that a function of VGAM186 is inhibition of expression of host target genes, as part of a novel viral mechanism of attacking a host. Accordingly, utilities of VGAM186 include diagnosis, prevention and treatment of viral infection by Vaccinia virus. Specific functions, and accordingly utilities, of VGAM186 correlate with, and may be deduced from, the identity of the host target genes which VGAM186 binds and inhibits, and the function of these host target genes, as elaborated hereinbelow.

[2569] Nucleotide sequences of the VGAM186 precursor RNA, herein designated VGAM PRECURSOR RNA, and of the diced VGAM186 RNA, herein designated VGAM RNA, and a schematic representation of the secondary folding of VGAM186 folded precursor RNA, herein designated VGAM FOLDED PRECURSOR RNA, of VGAM186 are further described hereinbelow with reference to Table 1.

[2570] Nucleotide sequences of host target binding sites, such as BINDING SITE-I, BINDING SITE-II and BINDING SITE-III of FIG. 1, found on, and schematic representation of the complementarity of each of these host target binding sites to VGAM186 RNA, herein designated VGAM RNA, are described hereinbelow with reference to Table 2.

[2571] FIG. 1 further provides a conceptual description of another novel bioinformatically detected viral gene of the present invention, referred to here as Viral Genomic Address Messenger 187 (VGAM187) viral gene, which modulates expression of respective host target genes thereof, the function and utility of which host target genes is known in the art.

[2572] VGAM187 is a novel bioinformatically detected regulatory, non protein coding, viral micro RNA (miRNA) gene. The method by which VGAM187 was detected is described hereinabove with reference to FIGS. 2-8.

[2573] VGAM187 gene, herein designated VGAM GENE, is a viral gene contained in the genome of Vaccinia virus. VGAM187 host target gene, herein designated VGAM HOST TARGET GENE, is a human gene contained in the human genome.

[2574] VGAM187 gene, herein designated VGAM GENE, encodes a VGAM187 precursor RNA, herein designated VGAM PRECURSOR RNA. Similar to other miRNA genes, and unlike most ordinary genes, VGAM187 precursor RNA, herein designated VGAM PRECURSOR RNA, does not encode a protein. A nucleotide sequence identical or highly similar to the nucleotide sequence of VGAM187 precursor RNA is designated SEQ ID:173, and is provided hereinbelow with reference to the sequence listing part. Nucleotide sequence SEQ ID:173 is located at position 98088 relative to the genome of Vaccinia virus.

[2575] VGAM187 precursor RNA, herein designated VGAM PRECURSOR RNA, folds onto itself, forming VGAM187 folded precursor RNA, herein designated VGAM FOLDED PRECURSOR RNA, which has a two-dimensional hairpin structure. As is well known in the art, this hairpin structure, is typical of RNA encoded by miRNA genes, and is due to the fact that the nucleotide sequence of the first half of the RNA encoded by a miRNA gene is an accurate or partial inversed-reversed sequence of the nucleotide sequence of the second half thereof.

[2576] An enzyme complex designated DICER COMPLEX, dices the VGAM187 folded precursor RNA, herein designated VGAM FOLDED PRECURSOR RNA, into VGAM187 RNA, herein designated VGAM RNA, a single stranded ˜22 nt long RNA segment. As is known in the art, dicing of a hairpin structured RNA precursor product into a short ˜22 nt RNA segment is catalyzed by an enzyme complex comprising an enzyme called Dicer together with other necessary proteins. A probable (over 88%) nucleotide sequence of VGAM187 RNA is designated SEQ ID:522, and is provided hereinbelow with reference to the sequence listing part.

[2577] VGAM187 host target gene, herein designated VGAM HOST TARGET GENE, encodes a corresponding messenger RNA, VGAM187 host target RNA, herein designated VGAM HOST TARGET RNA. VGAM187 host target RNA, herein designated VGAM HOST TARGET RNA, comprises three regions, as is typical of mRNA of a protein coding gene: a 5 untranslated region, a protein coding region and a 3 untranslated region, designated 5UTR, PROTEIN CODING and 3UTR respectively.

[2578] VGAM187 RNA, herein designated VGAM RNA, binds complementarily to one or more host target binding sites located in untranslated regions of VGAM187 host target RNA, herein designated VGAM HOST TARGET RNA. This complementary binding is due to the fact that the nucleotide sequence of VGAM187 RNA, herein designated VGAM RNA, is an accurate or a partial inversed-reversed sequence of the nucleotide sequence of each of the host target binding sites. As an illustration, FIG. 1 shows 3 such host target binding sites, designated BINDING SITE I, BINDING SITE II and BINDING SITE III respectively. It is appreciated that the number of host target binding sites shown in FIG. 1 is meant as an illustration only, and is not meant to be limiting VGAM187 RNA, herein designated VGAM RNA, may have a different number of host target binding sites in untranslated regions of a VGAM187 host target RNA, herein designated VGAM HOST TARGET RNA. It is further appreciated that while FIG. 1 depicts host target binding sites in the 3UTR region, this is meant as an example only these host target binding sites may be located in the 3UTR region, the 5UTR region, or in both 3UTR and 5UTR regions.

[2579] The complementary binding of VGAM187 RNA, herein designated VGAM RNA, to host target binding sites on VGAM187 host target RNA, herein designated VGAM HOST TARGET RNA, such as BINDING SITE I, BINDING SITE II and BINDING SITE III, inhibits translation of VGAM187 host target RNA, herein designated VGAM HOST TARGET RNA, into VGAM187 host target protein, herein designated VGAM HOST TARGET PROTEIN. VGAM host target protein is therefore outlined by a broken line.

[2580] It is appreciated that VGAM187 host target gene, herein designated VGAM HOST TARGET GENE, in fact represents a plurality of VGAM187 host target genes. The mRNA of each one of this plurality of VGAM187 host target genes comprises one or more host target binding sites, each having a nucleotide sequence which is at least partly complementary to VGAM187 RNA, herein designated VGAM RNA, and which when bound by VGAM187 RNA, herein designated VGAM RNA, causes inhibition of translation of respective one or more VGAM187 host target proteins.

[2581] It is further appreciated by one skilled in the art that the mode of translational inhibition illustrated by FIG. 1 with specific reference to translational inhibition exerted by VGAM187 gene, herein designated VGAM GENE, on one or more VGAM187 host target gene, herein designated VGAM HOST TARGET GENE, is in fact common to other known non-viral miRNA genes. As mentioned hereinabove with reference to the background section, although a specific complementary binding site has been demonstrated only for some of the known miRNA genes (primarily Lin-4 and Let-7), all other recently discovered miRNA genes are also believed by those skilled in the art to modulate expression of other genes by complementary binding, although specific complementary binding sites of these other miRNA genes have not yet been found (Ruvkun G., Perspective: Glimpses of a tiny RNA world, Science 294, 779 (2001)).

[2582] It is yet further appreciated that a function of VGAM187 is inhibition of expression of host target genes, as part of a novel viral mechanism of attacking a host. Accordingly, utilities of VGAM187 include diagnosis, prevention and treatment of viral infection by Vaccinia virus. Specific functions, and accordingly utilities, of VGAM187 correlate with, and may be deduced from, the identity of the host target genes which VGAM187 binds and inhibits, and the function of these host target genes, as elaborated hereinbelow.

[2583] Nucleotide sequences of the VGAM187 precursor RNA, herein designated VGAM PRECURSOR RNA, and of the diced VGAM187 RNA, herein designated VGAM RNA, and a schematic representation of the secondary folding of VGAM187 folded precursor RNA, herein designated VGAM FOLDED PRECURSOR RNA, of VGAM187 are further described hereinbelow with reference to Table 1.

[2584] Nucleotide sequences of host target binding sites, such as BINDING SITE-I, BINDING SITE-II and BINDING SITE-III of FIG. 1, found on, and schematic representation of the complementarity of each of these host target binding sites to VGAM187 RNA, herein designated VGAM RNA, are described hereinbelow with reference to Table 2.

[2585] FIG. 1 further provides a conceptual description of another novel bioinformatically detected viral gene of the present invention, referred to here as Viral Genomic Address Messenger 188 (VGAM188) viral gene, which modulates expression of respective host target genes thereof, the function and utility of which host target genes is known in the art.

[2586] VGAM188 is a novel bioinformatically detected regulatory, non protein coding, viral micro RNA (miRNA) gene. The method by which VGAM188 was detected is described hereinabove with reference to FIGS. 2-8.

[2587] VGAM188 gene, herein designated VGAM GENE, is a viral gene contained in the genome of Vaccinia virus. VGAM188 host target gene, herein designated VGAM HOST TARGET GENE, is a human gene contained in the human genome.

[2588] VGAM188 gene, herein designated VGAM GENE, encodes a VGAM188 precursor RNA, herein designated VGAM PRECURSOR RNA. Similar to other miRNA genes, and unlike most ordinary genes, VGAM188 precursor RNA, herein designated VGAM PRECURSOR RNA, does not encode a protein. A nucleotide sequence identical or highly similar to the nucleotide sequence of VGAM188 precursor RNA is designated SEQ ID:174, and is provided hereinbelow with reference to the sequence listing part. Nucleotide sequence SEQ ID:174 is located at position 97335 relative to the genome of Vaccinia virus.

[2589] VGAM188 precursor RNA, herein designated VGAM PRECURSOR RNA, folds onto itself, forming VGAM188 folded precursor RNA, herein designated VGAM FOLDED PRECURSOR RNA, which has a two-dimensional hairpin structure. As is well known in the art, this hairpin structure, is typical of RNA encoded by miRNA genes, and is due to the fact that the nucleotide sequence of the first half of the RNA encoded by a miRNA gene is an accurate or partial inversed-reversed sequence of the nucleotide sequence of the second half thereof.

[2590] An enzyme complex designated DICER COMPLEX, dices the VGAM188 folded precursor RNA, herein designated VGAM FOLDED PRECURSOR RNA, into VGAM188 RNA, herein designated VGAM RNA, a single stranded ˜22 nt long RNA segment. As is known in the art, dicing of a hairpin structured RNA precursor product into a short ˜22 nt RNA segment is catalyzed by an enzyme complex comprising an enzyme called Dicer together with other necessary proteins. A probable (over 82%) nucleotide sequence of VGAM188 RNA is designated SEQ ID:523, and is provided hereinbelow with reference to the sequence listing part.

[2591] VGAM188 host target gene, herein designated VGAM HOST TARGET GENE, encodes a corresponding messenger RNA, VGAM188 host target RNA, herein designated VGAM HOST TARGET RNA. VGAM188 host target RNA, herein designated VGAM HOST TARGET RNA, comprises three regions, as is typical of mRNA of a protein coding gene: a 5 untranslated region, a protein coding region and a 3 untranslated region, designated 5UTR, PROTEIN CODING and 3UTR respectively.

[2592] VGAM188 RNA, herein designated VGAM RNA, binds complementarily to one or more host target binding sites located in untranslated regions of VGAM188 host target RNA, herein designated VGAM HOST TARGET RNA. This complementary binding is due to the fact that the nucleotide sequence of VGAM188 RNA, herein designated VGAM RNA, is an accurate or a partial inversed-reversed sequence of the nucleotide sequence of each of the host target binding sites. As an illustration, FIG. 1 shows 3 such host target binding sites, designated BINDING SITE I, BINDING SITE II and BINDING SITE III respectively. It is appreciated that the number of host target binding sites shown in FIG. 1 is meant as an illustration only, and is not meant to be limiting VGAM188 RNA, herein designated VGAM RNA, may have a different number of host target binding sites in untranslated regions of a VGAM188 host target RNA, herein designated VGAM HOST TARGET RNA. It is further appreciated that while FIG. 1 depicts host target binding sites in the 3UTR region, this is meant as an example only these host target binding sites may be located in the 3UTR region, the 5UTR region, or in both 3UTR and 5UTR regions.

[2593] The complementary binding of VGAM188 RNA, herein designated VGAM RNA, to host target binding sites on VGAM188 host target RNA, herein designated VGAM HOST TARGET RNA, such as BINDING SITE I, BINDING SITE II and BINDING SITE III, inhibits translation of VGAM188 host target RNA, herein designated VGAM HOST TARGET RNA, into VGAM188 host target protein, herein designated VGAM HOST TARGET PROTEIN. VGAM host target protein is therefore outlined by a broken line.

[2594] It is appreciated that VGAM188 host target gene, herein designated VGAM HOST TARGET GENE, in fact represents a plurality of VGAM188 host target genes. The mRNA of each one of this plurality of VGAM188 host target genes comprises one or more host target binding sites, each having a nucleotide sequence which is at least partly complementary to VGAM188 RNA, herein designated VGAM RNA, and which when bound by VGAM188 RNA, herein designated VGAM RNA, causes inhibition of translation of respective one or more VGAM188 host target proteins.

[2595] It is further appreciated by one skilled in the art that the mode of translational inhibition illustrated by FIG. 1 with specific reference to translational inhibition exerted by VGAM188 gene, herein designated VGAM GENE, on one or more VGAM188 host target gene, herein designated VGAM HOST TARGET GENE, is in fact common to other known non-viral miRNA genes. As mentioned hereinabove with reference to the background section, although a specific complementary binding site has been demonstrated only for some of the known miRNA genes (primarily Lin-4 and Let-7), all other recently discovered miRNA genes are also believed by those skilled in the art to modulate expression of other genes by complementary binding, although specific complementary binding sites of these other miRNA genes have not yet been found (Ruvkun G., Perspective: Glimpses of a tiny RNA world, Science 294, 779 (2001)).

[2596] It is yet further appreciated that a function of VGAM188 is inhibition of expression of host target genes, as part of a novel viral mechanism of attacking a host. Accordingly, utilities of VGAM188 include diagnosis, prevention and treatment of viral infection by Vaccinia virus. Specific functions, and accordingly utilities, of VGAM188 correlate with, and may be deduced from, the identity of the host target genes which VGAM188 binds and inhibits, and the function of these host target genes, as elaborated hereinbelow.

[2597] Nucleotide sequences of the VGAM188 precursor RNA, herein designated VGAM PRECURSOR RNA, and of the diced VGAM188 RNA, herein designated VGAM RNA, and a schematic representation of the secondary folding of VGAM188 folded precursor RNA, herein designated VGAM FOLDED PRECURSOR RNA, of VGAM188 are further described hereinbelow with reference to Table 1.

[2598] Nucleotide sequences of host target binding sites, such as BINDING SITE-I, BINDING SITE-II and BINDING SITE-III of FIG. 1, found on, and schematic representation of the complementarity of each of these host target binding sites to VGAM188 RNA, herein designated VGAM RNA, are described hereinbelow with reference to Table 2.

[2599] FIG. 1 further provides a conceptual description of another novel bioinformatically detected viral gene of the present invention, referred to here as Viral Genomic Address Messenger 189 (VGAM189) viral gene, which modulates expression of respective host target genes thereof, the function and utility of which host target genes is known in the art.

[2600] VGAM189 is a novel bioinformatically detected regulatory, non protein coding, viral micro RNA (miRNA) gene. The method by which VGAM189 was detected is described hereinabove with reference to FIGS. 2-8.

[2601] VGAM189 gene, herein designated VGAM GENE, is a viral gene contained in the genome of Vaccinia virus. VGAM189 host target gene, herein designated VGAM HOST TARGET GENE, is a human gene contained in the human genome.

[2602] VGAM189 gene, herein designated VGAM GENE, encodes a VGAM189 precursor RNA, herein designated VGAM PRECURSOR RNA. Similar to other miRNA genes, and unlike most ordinary genes, VGAM189 precursor RNA, herein designated VGAM PRECURSOR RNA, does not encode a protein. A nucleotide sequence identical or highly similar to the nucleotide sequence of VGAM189 precursor RNA is designated SEQ ID:175, and is provided hereinbelow with reference to the sequence listing part. Nucleotide sequence SEQ ID:175 is located at position 96362 relative to the genome of Vaccinia virus.

[2603] VGAM189 precursor RNA, herein designated VGAM PRECURSOR RNA, folds onto itself, forming VGAM189 folded precursor RNA, herein designated VGAM FOLDED PRECURSOR RNA, which has a two-dimensional hairpin structure. As is well known in the art, this hairpin structure, is typical of RNA encoded by miRNA genes, and is due to the fact that the nucleotide sequence of the first half of the RNA encoded by a miRNA gene is an accurate or partial inversed-reversed sequence of the nucleotide sequence of the second half thereof.

[2604] An enzyme complex designated DICER COMPLEX, dices the VGAM189 folded precursor RNA, herein designated VGAM FOLDED PRECURSOR RNA, into VGAM189 RNA, herein designated VGAM RNA, a single stranded ˜22 nt long RNA segment. As is known in the art, dicing of a hairpin structured RNA precursor product into a short ˜22 nt RNA segment is catalyzed by an enzyme complex comprising an enzyme called Dicer together with other necessary proteins. A probable (over 88%) nucleotide sequence of VGAM189 RNA is designated SEQ ID:524, and is provided hereinbelow with reference to the sequence listing part.

[2605] VGAM189 host target gene, herein designated VGAM HOST TARGET GENE, encodes a corresponding messenger RNA, VGAM189 host target RNA, herein designated VGAM HOST TARGET RNA. VGAM189 host target RNA, herein designated VGAM HOST TARGET RNA, comprises three regions, as is typical of mRNA of a protein coding gene: a 5 untranslated region, a protein coding region and a 3 untranslated region, designated 5UTR, PROTEIN CODING and 3UTR respectively.

[2606] VGAM189 RNA, herein designated VGAM RNA, binds complementarily to one or more host target binding sites located in untranslated regions of VGAM189 host target RNA, herein designated VGAM HOST TARGET RNA. This complementary binding is due to the fact that the nucleotide sequence of VGAM189 RNA, herein designated VGAM RNA, is an accurate or a partial inversed-reversed sequence of the nucleotide sequence of each of the host target binding sites. As an illustration, FIG. 1 shows 3 such host target binding sites, designated BINDING SITE I, BINDING SITE II and BINDING SITE III respectively. It is appreciated that the number of host target binding sites shown in FIG. 1 is meant as an illustration only, and is not meant to be limiting VGAM189 RNA, herein designated VGAM RNA, may have a different number of host target binding sites in untranslated regions of a VGAM189 host target RNA, herein designated VGAM HOST TARGET RNA. It is further appreciated that while FIG. 1 depicts host target binding sites in the 3UTR region, this is meant as an example only these host target binding sites may be located in the 3UTR region, the 5UTR region, or in both 3UTR and 5UTR regions.

[2607] The complementary binding of VGAM189 RNA, herein designated VGAM RNA, to host target binding sites on VGAM189 host target RNA, herein designated VGAM HOST TARGET RNA, such as BINDING SITE I, BINDING SITE II and BINDING SITE III, inhibits translation of VGAM189 host target RNA, herein designated VGAM HOST TARGET RNA, into VGAM189 host target protein, herein designated VGAM HOST TARGET PROTEIN. VGAM host target protein is therefore outlined by a broken line.

[2608] It is appreciated that VGAM189 host target gene, herein designated VGAM HOST TARGET GENE, in fact represents a plurality of VGAM189 host target genes. The mRNA of each one of this plurality of VGAM189 host target genes comprises one or more host target binding sites, each having a nucleotide sequence which is at least partly complementary to VGAM189 RNA, herein designated VGAM RNA, and which when bound by VGAM189 RNA, herein designated VGAM RNA, causes inhibition of translation of respective one or more VGAM189 host target proteins.

[2609] It is further appreciated by one skilled in the art that the mode of translational inhibition illustrated by FIG. 1 with specific reference to translational inhibition exerted by VGAM189 gene, herein designated VGAM GENE, on one or more VGAM189 host target gene, herein designated VGAM HOST TARGET GENE, is in fact common to other known non-viral miRNA genes. As mentioned hereinabove with reference to the background section, although a specific complementary binding site has been demonstrated only for some of the known miRNA genes (primarily Lin-4 and Let-7), all other recently discovered miRNA genes are also believed by those skilled in the art to modulate expression of other genes by complementary binding, although specific complementary binding sites of these other miRNA genes have not yet been found (Ruvkun G., Perspective: Glimpses of a tiny RNA world, Science 294, 779 (2001)).

[2610] It is yet further appreciated that a function of VGAM189 is inhibition of expression of host target genes, as part of a novel viral mechanism of attacking a host. Accordingly, utilities of VGAM189 include diagnosis, prevention and treatment of viral infection by Vaccinia virus. Specific functions, and accordingly utilities, of VGAM189 correlate with, and may be deduced from, the identity of the host target genes which VGAM189 binds and inhibits, and the function of these host target genes, as elaborated hereinbelow.

[2611] Nucleotide sequences of the VGAM189 precursor RNA, herein designated VGAM PRECURSOR RNA, and of the diced VGAM189 RNA, herein designated VGAM RNA, and a schematic representation of the secondary folding of VGAM189 folded precursor RNA, herein designated VGAM FOLDED PRECURSOR RNA, of VGAM189 are further described hereinbelow with reference to Table 1.

[2612] Nucleotide sequences of host target binding sites, such as BINDING SITE-I, BINDING SITE-II and BINDING SITE-III of FIG. 1, found on, and schematic representation of the complementarity of each of these host target binding sites to VGAM189 RNA, herein designated VGAM RNA, are described hereinbelow with reference to Table 2.

[2613] FIG. 1 further provides a conceptual description of another novel bioinformatically detected viral gene of the present invention, referred to here as Viral Genomic Address Messenger 190 (VGAM190) viral gene, which modulates expression of respective host target genes thereof, the function and utility of which host target genes is known in the art.

[2614] VGAM190 is a novel bioinformatically detected regulatory, non protein coding, viral micro RNA (miRNA) gene. The method by which VGAM190 was detected is described hereinabove with reference to FIGS. 2-8.

[2615] VGAM190 gene, herein designated VGAM GENE, is a viral gene contained in the genome of Vaccinia virus. VGAM190 host target gene, herein designated VGAM HOST TARGET GENE, is a human gene contained in the human genome.

[2616] VGAM190 gene, herein designated VGAM GENE, encodes a VGAM190 precursor RNA, herein designated VGAM PRECURSOR RNA. Similar to other miRNA genes, and unlike most ordinary genes, VGAM190 precursor RNA, herein designated VGAM PRECURSOR RNA, does not encode a protein. A nucleotide sequence identical or highly similar to the nucleotide sequence of VGAM190 precursor RNA is designated SEQ ID:176, and is provided hereinbelow with reference to the sequence listing part. Nucleotide sequence SEQ ID:176 is located at position 100470 relative to the genome of Vaccinia virus.

[2617] VGAM190 precursor RNA, herein designated VGAM PRECURSOR RNA, folds onto itself, forming VGAM190 folded precursor RNA, herein designated VGAM FOLDED PRECURSOR RNA, which has a two-dimensional hairpin structure. As is well known in the art, this hairpin structure, is typical of RNA encoded by miRNA genes, and is due to the fact that the nucleotide sequence of the first half of the RNA encoded by a miRNA gene is an accurate or partial inversed-reversed sequence of the nucleotide sequence of the second half thereof.

[2618] An enzyme complex designated DICER COMPLEX, dices the VGAM190 folded precursor RNA, herein designated VGAM FOLDED PRECURSOR RNA, into VGAM190 RNA, herein designated VGAM RNA, a single stranded ˜22 nt long RNA segment. As is known in the art, dicing of a hairpin structured RNA precursor product into a short ˜22 nt RNA segment is catalyzed by an enzyme complex comprising an enzyme called Dicer together with other necessary proteins. A probable (over 87%) nucleotide sequence of VGAM190 RNA is designated SEQ ID:525, and is provided hereinbelow with reference to the sequence listing part.

[2619] VGAM190 host target gene, herein designated VGAM HOST TARGET GENE, encodes a corresponding messenger RNA, VGAM190 host target RNA, herein designated VGAM HOST TARGET RNA. VGAM190 host target RNA, herein designated VGAM HOST TARGET RNA, comprises three regions, as is typical of mRNA of a protein coding gene: a 5 untranslated region, a protein coding region and a 3 untranslated region, designated 5UTR, PROTEIN CODING and 3UTR respectively.

[2620] VGAM190 RNA, herein designated VGAM RNA, binds complementarily to one or more host target binding sites located in untranslated regions of VGAM190 host target RNA, herein designated VGAM HOST TARGET RNA. This complementary binding is due to the fact that the nucleotide sequence of VGAM190 RNA, herein designated VGAM RNA, is an accurate or a partial inversed-reversed sequence of the nucleotide sequence of each of the host target binding sites. As an illustration, FIG. 1 shows 3 such host target binding sites, designated BINDING SITE I, BINDING SITE II and BINDING SITE III respectively. It is appreciated that the number of host target binding sites shown in FIG. 1 is meant as an illustration only, and is not meant to be limiting VGAM190 RNA, herein designated VGAM RNA, may have a different number of host target binding sites in untranslated regions of a VGAM190 host target RNA, herein designated VGAM HOST TARGET RNA. It is further appreciated that while FIG. 1 depicts host target binding sites in the 3UTR region, this is meant as an example only these host target binding sites may be located in the 3UTR region, the 5UTR region, or in both 3UTR and 5UTR regions.

[2621] The complementary binding of VGAM190 RNA, herein designated VGAM RNA, to host target binding sites on VGAM190 host target RNA, herein designated VGAM HOST TARGET RNA, such as BINDING SITE I, BINDING SITE II and BINDING SITE III, inhibits translation of VGAM190 host target RNA, herein designated VGAM HOST TARGET RNA, into VGAM190 host target protein, herein designated VGAM HOST TARGET PROTEIN. VGAM host target protein is therefore outlined by a broken line.

[2622] It is appreciated that VGAM190 host target gene, herein designated VGAM HOST TARGET GENE, in fact represents a plurality of VGAM190 host target genes. The mRNA of each one of this plurality of VGAM190 host target genes comprises one or more host target binding sites, each having a nucleotide sequence which is at least partly complementary to VGAM190 RNA, herein designated VGAM RNA, and which when bound by VGAM190 RNA, herein designated VGAM RNA, causes inhibition of translation of respective one or more VGAM190 host target proteins.

[2623] It is further appreciated by one skilled in the art that the mode of translational inhibition illustrated by FIG. 1 with specific reference to translational inhibition exerted by VGAM190 gene, herein designated VGAM GENE, on one or more VGAM190 host target gene, herein designated VGAM HOST TARGET GENE, is in fact common to other known non-viral miRNA genes. As mentioned hereinabove with reference to the background section, although a specific complementary binding site has been demonstrated only for some of the known miRNA genes (primarily Lin-4 and Let-7), all other recently discovered miRNA genes are also believed by those skilled in the art to modulate expression of other genes by complementary binding, although specific complementary binding sites of these other miRNA genes have not yet been found (Ruvkun G., Perspective: Glimpses of a tiny RNA world, Science 294, 779 (2001)).

[2624] It is yet further appreciated that a function of VGAM190 is inhibition of expression of host target genes, as part of a novel viral mechanism of attacking a host. Accordingly, utilities of VGAM190 include diagnosis, prevention and treatment of viral infection by Vaccinia virus. Specific functions, and accordingly utilities, of VGAM190 correlate with, and may be deduced from, the identity of the host target genes which VGAM190 binds and inhibits, and the function of these host target genes, as elaborated hereinbelow.

[2625] Nucleotide sequences of the VGAM190 precursor RNA, herein designated VGAM PRECURSOR RNA, and of the diced VGAM190 RNA, herein designated VGAM RNA, and a schematic representation of the secondary folding of VGAM190 folded precursor RNA, herein designated VGAM FOLDED PRECURSOR RNA, of VGAM190 are further described hereinbelow with reference to Table 1.

[2626] Nucleotide sequences of host target binding sites, such as BINDING SITE-I, BINDING SITE-II and BINDING SITE-III of FIG. 1, found on, and schematic representation of the complementarity of each of these host target binding sites to VGAM190 RNA, herein designated VGAM RNA, are described hereinbelow with reference to Table 2.

[2627] FIG. 1 further provides a conceptual description of another novel bioinformatically detected viral gene of the present invention, referred to here as Viral Genomic Address Messenger 191 (VGAM191) viral gene, which modulates expression of respective host target genes thereof, the function and utility of which host target genes is known in the art.

[2628] VGAM191 is a novel bioinformatically detected regulatory, non protein coding, viral micro RNA (miRNA) gene. The method by which VGAM191 was detected is described hereinabove with reference to FIGS. 2-8.

[2629] VGAM191 gene, herein designated VGAM GENE, is a viral gene contained in the genome of Vaccinia virus. VGAM191 host target gene, herein designated VGAM HOST TARGET GENE, is a human gene contained in the human genome.

[2630] VGAM191 gene, herein designated VGAM GENE, encodes a VGAM191 precursor RNA, herein designated VGAM PRECURSOR RNA. Similar to other miRNA genes, and unlike most ordinary genes, VGAM191 precursor RNA, herein designated VGAM PRECURSOR RNA, does not encode a protein. A nucleotide sequence identical or highly similar to the nucleotide sequence of VGAM191 precursor RNA is designated SEQ ID:177, and is provided hereinbelow with reference to the sequence listing part. Nucleotide sequence SEQ ID:177 is located at position 99909 relative to the genome of Vaccinia virus.

[2631] VGAM191 precursor RNA, herein designated VGAM PRECURSOR RNA, folds onto itself, forming VGAM191 folded precursor RNA, herein designated VGAM FOLDED PRECURSOR RNA, which has a two-dimensional hairpin structure. As is well known in the art, this hairpin structure, is typical of RNA encoded by miRNA genes, and is due to the fact that the nucleotide sequence of the first half of the RNA encoded by a miRNA gene is an accurate or partial inversed-reversed sequence of the nucleotide sequence of the second half thereof.

[2632] An enzyme complex designated DICER COMPLEX, dices the VGAM191 folded precursor RNA, herein designated VGAM FOLDED PRECURSOR RNA, into VGAM191 RNA, herein designated VGAM RNA, a single stranded ˜22 nt long RNA segment. As is known in the art, dicing of a hairpin structured RNA precursor product into a short ˜22 nt RNA segment is catalyzed by an enzyme complex comprising an enzyme called Dicer together with other necessary proteins. A probable (over 90%) nucleotide sequence of VGAM191 RNA is designated SEQ ID:526, and is provided hereinbelow with reference to the sequence listing part.

[2633] VGAM191 host target gene, herein designated VGAM HOST TARGET GENE, encodes a corresponding messenger RNA, VGAM191 host target RNA, herein designated VGAM HOST TARGET RNA. VGAM191 host target RNA, herein designated VGAM HOST TARGET RNA, comprises three regions, as is typical of mRNA of a protein coding gene: a 5 untranslated region, a protein coding region and a 3 untranslated region, designated 5UTR, PROTEIN CODING and 3UTR respectively.

[2634] VGAM191 RNA, herein designated VGAM RNA, binds complementarily to one or more host target binding sites located in untranslated regions of VGAM191 host target RNA, herein designated VGAM HOST TARGET RNA. This complementary binding is due to the fact that the nucleotide sequence of VGAM191 RNA, herein designated VGAM RNA, is an accurate or a partial inversed-reversed sequence of the nucleotide sequence of each of the host target binding sites. As an illustration, FIG. 1 shows 3 such host target binding sites, designated BINDING SITE I, BINDING SITE II and BINDING SITE III respectively. It is appreciated that the number of host target binding sites shown in FIG. 1 is meant as an illustration only, and is not meant to be limiting VGAM191 RNA, herein designated VGAM RNA, may have a different number of host target binding sites in untranslated regions of a VGAM191 host target RNA, herein designated VGAM HOST TARGET RNA. It is further appreciated that while FIG. 1 depicts host target binding sites in the 3UTR region, this is meant as an example only these host target binding sites may be located in the 3UTR region, the 5UTR region, or in both 3UTR and 5UTR regions.

[2635] The complementary binding of VGAM191 RNA, herein designated VGAM RNA, to host target binding sites on VGAM191 host target RNA, herein designated VGAM HOST TARGET RNA, such as BINDING SITE I, BINDING SITE II and BINDING SITE III, inhibits translation of VGAM191 host target RNA, herein designated VGAM HOST TARGET RNA, into VGAM191 host target protein, herein designated VGAM HOST TARGET PROTEIN. VGAM host target protein is therefore outlined by a broken line.

[2636] It is appreciated that VGAM191 host target gene, herein designated VGAM HOST TARGET GENE, in fact represents a plurality of VGAM191 host target genes. The mRNA of each one of this plurality of VGAM191 host target genes comprises one or more host target binding sites, each having a nucleotide sequence which is at least partly complementary to VGAM191 RNA, herein designated VGAM RNA, and which when bound by VGAM191 RNA, herein designated VGAM RNA, causes inhibition of translation of respective one or more VGAM191 host target proteins.

[2637] It is further appreciated by one skilled in the art that the mode of translational inhibition illustrated by FIG. 1 with specific reference to translational inhibition exerted by VGAM191 gene, herein designated VGAM GENE, on one or more VGAM191 host target gene, herein designated VGAM HOST TARGET GENE, is in fact common to other known non-viral miRNA genes. As mentioned hereinabove with reference to the background section, although a specific complementary binding site has been demonstrated only for some of the known miRNA genes (primarily Lin-4 and Let-7), all other recently discovered miRNA genes are also believed by those skilled in the art to modulate expression of other genes by complementary binding, although specific complementary binding sites of these other miRNA genes have not yet been found (Ruvkun G., Perspective: Glimpses of a tiny RNA world, Science 294, 779 (2001)).

[2638] It is yet further appreciated that a function of VGAM191 is inhibition of expression of host target genes, as part of a novel viral mechanism of attacking a host. Accordingly, utilities of VGAM191 include diagnosis, prevention and treatment of viral infection by Vaccinia virus. Specific functions, and accordingly utilities, of VGAM191 correlate with, and may be deduced from, the identity of the host target genes which VGAM191 binds and inhibits, and the function of these host target genes, as elaborated hereinbelow.

[2639] Nucleotide sequences of the VGAM191 precursor RNA, herein designated VGAM PRECURSOR RNA, and of the diced VGAM191 RNA, herein designated VGAM RNA, and a schematic representation of the secondary folding of VGAM191 folded precursor RNA, herein designated VGAM FOLDED PRECURSOR RNA, of VGAM191 are further described hereinbelow with reference to Table 1.

[2640] Nucleotide sequences of host target binding sites, such as BINDING SITE-I, BINDING SITE-II and BINDING SITE-III of FIG. 1, found on, and schematic representation of the complementarity of each of these host target binding sites to VGAM191 RNA, herein designated VGAM RNA, are described hereinbelow with reference to Table 2.

[2641] FIG. 1 further provides a conceptual description of another novel bioinformatically detected viral gene of the present invention, referred to here as Viral Genomic Address Messenger 192 (VGAM192) viral gene, which modulates expression of respective host target genes thereof, the function and utility of which host target genes is known in the art.

[2642] VGAM192 is a novel bioinformatically detected regulatory, non protein coding, viral micro RNA (miRNA) gene. The method by which VGAM192 was detected is described hereinabove with reference to FIGS. 2-8.

[2643] VGAM192 gene, herein designated VGAM GENE, is a viral gene contained in the genome of Vaccinia virus. VGAM192 host target gene, herein designated VGAM HOST TARGET GENE, is a human gene contained in the human genome.

[2644] VGAM192 gene, herein designated VGAM GENE, encodes a VGAM192 precursor RNA, herein designated VGAM PRECURSOR RNA. Similar to other miRNA genes, and unlike most ordinary genes, VGAM192 precursor RNA, herein designated VGAM PRECURSOR RNA, does not encode a protein. A nucleotide sequence identical or highly similar to the nucleotide sequence of VGAM192 precursor RNA is designated SEQ ID:178, and is provided hereinbelow with reference to the sequence listing part. Nucleotide sequence SEQ ID:178 is located at position 102578 relative to the genome of Vaccinia virus.

[2645] VGAM192 precursor RNA, herein designated VGAM PRECURSOR RNA, folds onto itself, forming VGAM192 folded precursor RNA, herein designated VGAM FOLDED PRECURSOR RNA, which has a two-dimensional hairpin structure. As is well known in the art, this hairpin structure, is typical of RNA encoded by miRNA genes, and is due to the fact that the nucleotide sequence of the first half of the RNA encoded by a miRNA gene is an accurate or partial inversed-reversed sequence of the nucleotide sequence of the second half thereof.

[2646] An enzyme complex designated DICER COMPLEX, dices the VGAM192 folded precursor RNA, herein designated VGAM FOLDED PRECURSOR RNA, into VGAM192 RNA, herein designated VGAM RNA, a single stranded ˜22 nt long RNA segment. As is known in the art, dicing of a hairpin structured RNA precursor product into a short ˜22 nt RNA segment is catalyzed by an enzyme complex comprising an enzyme called Dicer together with other necessary proteins. A probable (over 73%) nucleotide sequence of VGAM192 RNA is designated SEQ ID:527, and is provided hereinbelow with reference to the sequence listing part.

[2647] VGAM192 host target gene, herein designated VGAM HOST TARGET GENE, encodes a corresponding messenger RNA, VGAM192 host target RNA, herein designated VGAM HOST TARGET RNA. VGAM192 host target RNA, herein designated VGAM HOST TARGET RNA, comprises three regions, as is typical of mRNA of a protein coding gene: a 5 untranslated region, a protein coding region and a 3 untranslated region, designated 5UTR, PROTEIN CODING and 3UTR respectively.

[2648] VGAM192 RNA, herein designated VGAM RNA, binds complementarily to one or more host target binding sites located in untranslated regions of VGAM192 host target RNA, herein designated VGAM HOST TARGET RNA. This complementary binding is due to the fact that the nucleotide sequence of VGAM192 RNA, herein designated VGAM RNA, is an accurate or a partial inversed-reversed sequence of the nucleotide sequence of each of the host target binding sites. As an illustration, FIG. 1 shows 3 such host target binding sites, designated BINDING SITE I, BINDING SITE II and BINDING SITE III respectively. It is appreciated that the number of host target binding sites shown in FIG. 1 is meant as an illustration only, and is not meant to be limiting VGAM192 RNA, herein designated VGAM RNA, may have a different number of host target binding sites in untranslated regions of a VGAM192 host target RNA, herein designated VGAM HOST TARGET RNA. It is further appreciated that while FIG. 1 depicts host target binding sites in the 3UTR region, this is meant as an example only these host target binding sites may be located in the 3UTR region, the 5UTR region, or in both 3UTR and 5UTR regions.

[2649] The complementary binding of VGAM192 RNA, herein designated VGAM RNA, to host target binding sites on VGAM192 host target RNA, herein designated VGAM HOST TARGET RNA, such as BINDING SITE I, BINDING SITE II and BINDING SITE III, inhibits translation of VGAM192 host target RNA, herein designated VGAM HOST TARGET RNA, into VGAM192 host target protein, herein designated VGAM HOST TARGET PROTEIN. VGAM host target protein is therefore outlined by a broken line.

[2650] It is appreciated that VGAM192 host target gene, herein designated VGAM HOST TARGET GENE, in fact represents a plurality of VGAM192 host target genes. The mRNA of each one of this plurality of VGAM192 host target genes comprises one or more host target binding sites, each having a nucleotide sequence which is at least partly complementary to VGAM192 RNA, herein designated VGAM RNA, and which when bound by VGAM192 RNA, herein designated VGAM RNA, causes inhibition of translation of respective one or more VGAM192 host target proteins.

[2651] It is further appreciated by one skilled in the art that the mode of translational inhibition illustrated by FIG. 1 with specific reference to translational inhibition exerted by VGAM192 gene, herein designated VGAM GENE, on one or more VGAM192 host target gene, herein designated VGAM HOST TARGET GENE, is in fact common to other known non-viral miRNA genes. As mentioned hereinabove with reference to the background section, although a specific complementary binding site has been demonstrated only for some of the known miRNA genes (primarily Lin-4 and Let-7), all other recently discovered miRNA genes are also believed by those skilled in the art to modulate expression of other genes by complementary binding, although specific complementary binding sites of these other miRNA genes have not yet been found (Ruvkun G., Perspective: Glimpses of a tiny RNA world, Science 294, 779 (2001)).

[2652] It is yet further appreciated that a function of VGAM192 is inhibition of expression of host target genes, as part of a novel viral mechanism of attacking a host. Accordingly, utilities of VGAM192 include diagnosis, prevention and treatment of viral infection by Vaccinia virus. Specific functions, and accordingly utilities, of VGAM192 correlate with, and may be deduced from, the identity of the host target genes which VGAM192 binds and inhibits, and the function of these host target genes, as elaborated hereinbelow.

[2653] Nucleotide sequences of the VGAM192 precursor RNA, herein designated VGAM PRECURSOR RNA, and of the diced VGAM192 RNA, herein designated VGAM RNA, and a schematic representation of the secondary folding of VGAM192 folded precursor RNA, herein designated VGAM FOLDED PRECURSOR RNA, of VGAM192 are further described hereinbelow with reference to Table 1.

[2654] Nucleotide sequences of host target binding sites, such as BINDING SITE-I, BINDING SITE-II and BINDING SITE-III of FIG. 1, found on, and schematic representation of the complementarity of each of these host target binding sites to VGAM192 RNA, herein designated VGAM RNA, are described hereinbelow with reference to Table 2.

[2655] FIG. 1 further provides a conceptual description of another novel bioinformatically detected viral gene of the present invention, referred to here as Viral Genomic Address Messenger 193 (VGAM193) viral gene, which modulates expression of respective host target genes thereof, the function and utility of which host target genes is known in the art.

[2656] VGAM193 is a novel bioinformatically detected regulatory, non protein coding, viral micro RNA (miRNA) gene. The method by which VGAM193 was detected is described hereinabove with reference to FIGS. 2-8.

[2657] VGAM193 gene, herein designated VGAM GENE, is a viral gene contained in the genome of Vaccinia virus. VGAM193 host target gene, herein designated VGAM HOST TARGET GENE, is a human gene contained in the human genome.

[2658] VGAM193 gene, herein designated VGAM GENE, encodes a VGAM193 precursor RNA, herein designated VGAM PRECURSOR RNA. Similar to other miRNA genes, and unlike most ordinary genes, VGAM193 precursor RNA, herein designated VGAM PRECURSOR RNA, does not encode a protein. A nucleotide sequence identical or highly similar to the nucleotide sequence of VGAM193 precursor RNA is designated SEQ ID:179, and is provided hereinbelow with reference to the sequence listing part. Nucleotide sequence SEQ ID:179 is located at position 103285 relative to the genome of Vaccinia virus.

[2659] VGAM193 precursor RNA, herein designated VGAM PRECURSOR RNA, folds onto itself, forming VGAM193 folded precursor RNA, herein designated VGAM FOLDED PRECURSOR RNA, which has a two-dimensional hairpin structure. As is well known in the art, this hairpin structure, is typical of RNA encoded by miRNA genes, and is due to the fact that the nucleotide sequence of the first half of the RNA encoded by a miRNA gene is an accurate or partial inversed-reversed sequence of the nucleotide sequence of the second half thereof.

[2660] An enzyme complex designated DICER COMPLEX, dices the VGAM193 folded precursor RNA, herein designated VGAM FOLDED PRECURSOR RNA, into VGAM193 RNA, herein designated VGAM RNA, a single stranded ˜22 nt long RNA segment. As is known in the art, dicing of a hairpin structured RNA precursor product into a short ˜22 nt RNA segment is catalyzed by an enzyme complex comprising an enzyme called Dicer together with other necessary proteins. A probable (over 90%) nucleotide sequence of VGAM193 RNA is designated SEQ ID:528, and is provided hereinbelow with reference to the sequence listing part.

[2661] VGAM193 host target gene, herein designated VGAM HOST TARGET GENE, encodes a corresponding messenger RNA, VGAM193 host target RNA, herein designated VGAM HOST TARGET RNA. VGAM193 host target RNA, herein designated VGAM HOST TARGET RNA, comprises three regions, as is typical of mRNA of a protein coding gene: a 5 untranslated region, a protein coding region and a 3 untranslated region, designated 5UTR, PROTEIN CODING and 3UTR respectively.

[2662] VGAM193 RNA, herein designated VGAM RNA, binds complementarily to one or more host target binding sites located in untranslated regions of VGAM193 host target RNA, herein designated VGAM HOST TARGET RNA. This complementary binding is due to the fact that the nucleotide sequence of VGAM193 RNA, herein designated VGAM RNA, is an accurate or a partial inversed-reversed sequence of the nucleotide sequence of each of the host target binding sites. As an illustration, FIG. 1 shows 3 such host target binding sites, designated BINDING SITE I, BINDING SITE II and BINDING SITE III respectively. It is appreciated that the number of host target binding sites shown in FIG. 1 is meant as an illustration only, and is not meant to be limiting VGAM193 RNA, herein designated VGAM RNA, may have a different number of host target binding sites in untranslated regions of a VGAM193 host target RNA, herein designated VGAM HOST TARGET RNA. It is further appreciated that while FIG. 1 depicts host target binding sites in the 3UTR region, this is meant as an example only these host target binding sites may be located in the 3UTR region, the 5UTR region, or in both 3UTR and 5UTR regions.

[2663] The complementary binding of VGAM193 RNA, herein designated VGAM RNA, to host target binding sites on VGAM193 host target RNA, herein designated VGAM HOST TARGET RNA, such as BINDING SITE I, BINDING SITE II and BINDING SITE III, inhibits translation of VGAM193 host target RNA, herein designated VGAM HOST TARGET RNA, into VGAM193 host target protein, herein designated VGAM HOST TARGET PROTEIN. VGAM host target protein is therefore outlined by a broken line.

[2664] It is appreciated that VGAM193 host target gene, herein designated VGAM HOST TARGET GENE, in fact represents a plurality of VGAM193 host target genes. The mRNA of each one of this plurality of VGAM193 host target genes comprises one or more host target binding sites, each having a nucleotide sequence which is at least partly complementary to VGAM193 RNA, herein designated VGAM RNA, and which when bound by VGAM193 RNA, herein designated VGAM RNA, causes inhibition of translation of respective one or more VGAM193 host target proteins.

[2665] It is further appreciated by one skilled in the art that the mode of translational inhibition illustrated by FIG. 1 with specific reference to translational inhibition exerted by VGAM193 gene, herein designated VGAM GENE, on one or more VGAM193 host target gene, herein designated VGAM HOST TARGET GENE, is in fact common to other known non-viral miRNA genes. As mentioned hereinabove with reference to the background section, although a specific complementary binding site has been demonstrated only for some of the known miRNA genes (primarily Lin-4 and Let-7), all other recently discovered miRNA genes are also believed by those skilled in the art to modulate expression of other genes by complementary binding, although specific complementary binding sites of these other miRNA genes have not yet been found (Ruvkun G., Perspective: Glimpses of a tiny RNA world, Science 294, 779 (2001)).

[2666] It is yet further appreciated that a function of VGAM193 is inhibition of expression of host target genes, as part of a novel viral mechanism of attacking a host. Accordingly, utilities of VGAM193 include diagnosis, prevention and treatment of viral infection by Vaccinia virus. Specific functions, and accordingly utilities, of VGAM193 correlate with, and may be deduced from, the identity of the host target genes which VGAM193 binds and inhibits, and the function of these host target genes, as elaborated hereinbelow.

[2667] Nucleotide sequences of the VGAM193 precursor RNA, herein designated VGAM PRECURSOR RNA, and of the diced VGAM193 RNA, herein designated VGAM RNA, and a schematic representation of the secondary folding of VGAM193 folded precursor RNA, herein designated VGAM FOLDED PRECURSOR RNA, of VGAM193 are further described hereinbelow with reference to Table 1.

[2668] Nucleotide sequences of host target binding sites, such as BINDING SITE-I, BINDING SITE-II and BINDING SITE-III of FIG. 1, found on, and schematic representation of the complementarity of each of these host target binding sites to VGAM193 RNA, herein designated VGAM RNA, are described hereinbelow with reference to Table 2.

[2669] FIG. 1 further provides a conceptual description of another novel bioinformatically detected viral gene of the present invention, referred to here as Viral Genomic Address Messenger 194 (VGAM194) viral gene, which modulates expression of respective host target genes thereof, the function and utility of which host target genes is known in the art.

[2670] VGAM194 is a novel bioinformatically detected regulatory, non protein coding, viral micro RNA (miRNA) gene. The method by which VGAM194 was detected is described hereinabove with reference to FIGS. 2-8.

[2671] VGAM194 gene, herein designated VGAM GENE, is a viral gene contained in the genome of Vaccinia virus. VGAM194 host target gene, herein designated VGAM HOST TARGET GENE, is a human gene contained in the human genome.

[2672] VGAM194 gene, herein designated VGAM GENE, encodes a VGAM194 precursor RNA, herein designated VGAM PRECURSOR RNA. Similar to other miRNA genes, and unlike most ordinary genes, VGAM194 precursor RNA, herein designated VGAM PRECURSOR RNA, does not encode a protein. A nucleotide sequence identical or highly similar to the nucleotide sequence of VGAM194 precursor RNA is designated SEQ ID:180, and is provided hereinbelow with reference to the sequence listing part. Nucleotide sequence SEQ ID:180 is located at position 103379 relative to the genome of Vaccinia virus.

[2673] VGAM194 precursor RNA, herein designated VGAM PRECURSOR RNA, folds onto itself, forming VGAM194 folded precursor RNA, herein designated VGAM FOLDED PRECURSOR RNA, which has a two-dimensional hairpin structure. As is well known in the art, this hairpin structure, is typical of RNA encoded by miRNA genes, and is due to the fact that the nucleotide sequence of the first half of the RNA encoded by a miRNA gene is an accurate or partial inversed-reversed sequence of the nucleotide sequence of the second half thereof.

[2674] An enzyme complex designated DICER COMPLEX, dices the VGAM194 folded precursor RNA, herein designated VGAM FOLDED PRECURSOR RNA, into VGAM194 RNA, herein designated VGAM RNA, a single stranded ˜22 nt long RNA segment. As is known in the art, dicing of a hairpin structured RNA precursor product into a short ˜22 nt RNA segment is catalyzed by an enzyme complex comprising an enzyme called Dicer together with other necessary proteins. A probable (over 88%) nucleotide sequence of VGAM194 RNA is designated SEQ ID:529, and is provided hereinbelow with reference to the sequence listing part.

[2675] VGAM194 host target gene, herein designated VGAM HOST TARGET GENE, encodes a corresponding messenger RNA, VGAM194 host target RNA, herein designated VGAM HOST TARGET RNA. VGAM194 host target RNA, herein designated VGAM HOST TARGET RNA, comprises three regions, as is typical of mRNA of a protein coding gene: a 5 untranslated region, a protein coding region and a 3 untranslated region, designated 5UTR, PROTEIN CODING and 3UTR respectively.

[2676] VGAM194 RNA, herein designated VGAM RNA, binds complementarily to one or more host target binding sites located in untranslated regions of VGAM194 host target RNA, herein designated VGAM HOST TARGET RNA. This complementary binding is due to the fact that the nucleotide sequence of VGAM194 RNA, herein designated VGAM RNA, is an accurate or a partial inversed-reversed sequence of the nucleotide sequence of each of the host target binding sites. As an illustration, FIG. 1 shows 3 such host target binding sites, designated BINDING SITE I, BINDING SITE II and BINDING SITE III respectively. It is appreciated that the number of host target binding sites shown in FIG. 1 is meant as an illustration only, and is not meant to be limiting VGAM194 RNA, herein designated VGAM RNA, may have a different number of host target binding sites in untranslated regions of a VGAM194 host target RNA, herein designated VGAM HOST TARGET RNA. It is further appreciated that while FIG. 1 depicts host target binding sites in the 3UTR region, this is meant as an example only these host target binding sites may be located in the 3UTR region, the 5UTR region, or in both 3UTR and 5UTR regions.

[2677] The complementary binding of VGAM194 RNA, herein designated VGAM RNA, to host target binding sites on VGAM194 host target RNA, herein designated VGAM HOST TARGET RNA, such as BINDING SITE I, BINDING SITE II and BINDING SITE III, inhibits translation of VGAM194 host target RNA, herein designated VGAM HOST TARGET RNA, into VGAM194 host target protein, herein designated VGAM HOST TARGET PROTEIN. VGAM host target protein is therefore outlined by a broken line.

[2678] It is appreciated that VGAM194 host target gene, herein designated VGAM HOST TARGET GENE, in fact represents a plurality of VGAM194 host target genes. The mRNA of each one of this plurality of VGAM194 host target genes comprises one or more host target binding sites, each having a nucleotide sequence which is at least partly complementary to VGAM194 RNA, herein designated VGAM RNA, and which when bound by VGAM194 RNA, herein designated VGAM RNA, causes inhibition of translation of respective one or more VGAM194 host target proteins.

[2679] It is further appreciated by one skilled in the art that the mode of translational inhibition illustrated by FIG. 1 with specific reference to translational inhibition exerted by VGAM194 gene, herein designated VGAM GENE, on one or more VGAM194 host target gene, herein designated VGAM HOST TARGET GENE, is in fact common to other known non-viral miRNA genes. As mentioned hereinabove with reference to the background section, although a specific complementary binding site has been demonstrated only for some of the known miRNA genes (primarily Lin-4 and Let-7), all other recently discovered miRNA genes are also believed by those skilled in the art to modulate expression of other genes by complementary binding, although specific complementary binding sites of these other miRNA genes have not yet been found (Ruvkun G., Perspective: Glimpses of a tiny RNA world, Science 294, 779 (2001)).

[2680] It is yet further appreciated that a function of VGAM194 is inhibition of expression of host target genes, as part of a novel viral mechanism of attacking a host. Accordingly, utilities of VGAM194 include diagnosis, prevention and treatment of viral infection by Vaccinia virus. Specific functions, and accordingly utilities, of VGAM194 correlate with, and may be deduced from, the identity of the host target genes which VGAM194 binds and inhibits, and the function of these host target genes, as elaborated hereinbelow.

[2681] Nucleotide sequences of the VGAM194 precursor RNA, herein designated VGAM PRECURSOR RNA, and of the diced VGAM194 RNA, herein designated VGAM RNA, and a schematic representation of the secondary folding of VGAM194 folded precursor RNA, herein designated VGAM FOLDED PRECURSOR RNA, of VGAM194 are further described hereinbelow with reference to Table 1.

[2682] Nucleotide sequences of host target binding sites, such as BINDING SITE-I, BINDING SITE-II and BINDING SITE-III of FIG. 1, found on, and schematic representation of the complementarity of each of these host target binding sites to VGAM194 RNA, herein designated VGAM RNA, are described hereinbelow with reference to Table 2.

[2683] FIG. 1 further provides a conceptual description of another novel bioinformatically detected viral gene of the present invention, referred to here as Viral Genomic Address Messenger 195 (VGAM195) viral gene, which modulates expression of respective host target genes thereof, the function and utility of which host target genes is known in the art.

[2684] VGAM195 is a novel bioinformatically detected regulatory, non protein coding, viral micro RNA (miRNA) gene. The method by which VGAM195 was detected is described hereinabove with reference to FIGS. 2-8.

[2685] VGAM195 gene, herein designated VGAM GENE, is a viral gene contained in the genome of Vaccinia virus. VGAM195 host target gene, herein designated VGAM HOST TARGET GENE, is a human gene contained in the human genome.

[2686] VGAM195 gene, herein designated VGAM GENE, encodes a VGAM195 precursor RNA, herein designated VGAM PRECURSOR RNA. Similar to other miRNA genes, and unlike most ordinary genes, VGAM195 precursor RNA, herein designated VGAM PRECURSOR RNA, does not encode a protein. A nucleotide sequence identical or highly similar to the nucleotide sequence of VGAM195 precursor RNA is designated SEQ ID:181, and is provided hereinbelow with reference to the sequence listing part. Nucleotide sequence SEQ ID:181 is located at position 105936 relative to the genome of Vaccinia virus.

[2687] VGAM195 precursor RNA, herein designated VGAM PRECURSOR RNA, folds onto itself, forming VGAM195 folded precursor RNA, herein designated VGAM FOLDED PRECURSOR RNA, which has a two-dimensional hairpin structure. As is well known in the art, this hairpin structure, is typical of RNA encoded by miRNA genes, and is due to the fact that the nucleotide sequence of the first half of the RNA encoded by a miRNA gene is an accurate or partial inversed-reversed sequence of the nucleotide sequence of the second half thereof.

[2688] An enzyme complex designated DICER COMPLEX, dices the VGAM195 folded precursor RNA, herein designated VGAM FOLDED PRECURSOR RNA, into VGAM195 RNA, herein designated VGAM RNA, a single stranded ˜22 nt long RNA segment. As is known in the art, dicing of a hairpin structured RNA precursor product into a short ˜22 nt RNA segment is catalyzed by an enzyme complex comprising an enzyme called Dicer together with other necessary proteins. A probable (over 87%) nucleotide sequence of VGAM195 RNA is designated SEQ ID:530, and is provided hereinbelow with reference to the sequence listing part.

[2689] VGAM195 host target gene, herein designated VGAM HOST TARGET GENE, encodes a corresponding messenger RNA, VGAM195 host target RNA, herein designated VGAM HOST TARGET RNA. VGAM195 host target RNA, herein designated VGAM HOST TARGET RNA, comprises three regions, as is typical of mRNA of a protein coding gene: a 5 untranslated region, a protein coding region and a 3 untranslated region, designated 5UTR, PROTEIN CODING and 3UTR respectively.

[2690] VGAM195 RNA, herein designated VGAM RNA, binds complementarily to one or more host target binding sites located in untranslated regions of VGAM195 host target RNA, herein designated VGAM HOST TARGET RNA. This complementary binding is due to the fact that the nucleotide sequence of VGAM195 RNA, herein designated VGAM RNA, is an accurate or a partial inversed-reversed sequence of the nucleotide sequence of each of the host target binding sites. As an illustration, FIG. 1 shows 3 such host target binding sites, designated BINDING SITE I, BINDING SITE II and BINDING SITE III respectively. It is appreciated that the number of host target binding sites shown in FIG. 1 is meant as an illustration only, and is not meant to be limiting VGAM195 RNA, herein designated VGAM RNA, may have a different number of host target binding sites in untranslated regions of a VGAM195 host target RNA, herein designated VGAM HOST TARGET RNA. It is further appreciated that while FIG. 1 depicts host target binding sites in the 3UTR region, this is meant as an example only these host target binding sites may be located in the 3UTR region, the 5UTR region, or in both 3UTR and 5UTR regions.

[2691] The complementary binding of VGAM195 RNA, herein designated VGAM RNA, to host target binding sites on VGAM195 host target RNA, herein designated VGAM HOST TARGET RNA, such as BINDING SITE I, BINDING SITE II and BINDING SITE III, inhibits translation of VGAM195 host target RNA, herein designated VGAM HOST TARGET RNA, into VGAM195 host target protein, herein designated VGAM HOST TARGET PROTEIN. VGAM host target protein is therefore outlined by a broken line.

[2692] It is appreciated that VGAM195 host target gene, herein designated VGAM HOST TARGET GENE, in fact represents a plurality of VGAM195 host target genes. The mRNA of each one of this plurality of VGAM195 host target genes comprises one or more host target binding sites, each having a nucleotide sequence which is at least partly complementary to VGAM195 RNA, herein designated VGAM RNA, and which when bound by VGAM195 RNA, herein designated VGAM RNA, causes inhibition of translation of respective one or more VGAM195 host target proteins.

[2693] It is further appreciated by one skilled in the art that the mode of translational inhibition illustrated by FIG. 1 with specific reference to translational inhibition exerted by VGAM195 gene, herein designated VGAM GENE, on one or more VGAM195 host target gene, herein designated VGAM HOST TARGET GENE, is in fact common to other known non-viral miRNA genes. As mentioned hereinabove with reference to the background section, although a specific complementary binding site has been demonstrated only for some of the known miRNA genes (primarily Lin-4 and Let-7), all other recently discovered miRNA genes are also believed by those skilled in the art to modulate expression of other genes by complementary binding, although specific complementary binding sites of these other miRNA genes have not yet been found (Ruvkun G., Perspective: Glimpses of a tiny RNA world, Science 294, 779 (2001)).

[2694] It is yet further appreciated that a function of VGAM195 is inhibition of expression of host target genes, as part of a novel viral mechanism of attacking a host. Accordingly, utilities of VGAM195 include diagnosis, prevention and treatment of viral infection by Vaccinia virus. Specific functions, and accordingly utilities, of VGAM195 correlate with, and may be deduced from, the identity of the host target genes which VGAM195 binds and inhibits, and the function of these host target genes, as elaborated hereinbelow.

[2695] Nucleotide sequences of the VGAM195 precursor RNA, herein designated VGAM PRECURSOR RNA, and of the diced VGAM195 RNA, herein designated VGAM RNA, and a schematic representation of the secondary folding of VGAM195 folded precursor RNA, herein designated VGAM FOLDED PRECURSOR RNA, of VGAM195 are further described hereinbelow with reference to Table 1.

[2696] Nucleotide sequences of host target binding sites, such as BINDING SITE-I, BINDING SITE-II and BINDING SITE-III of FIG. 1, found on, and schematic representation of the complementarity of each of these host target binding sites to VGAM195 RNA, herein designated VGAM RNA, are described hereinbelow with reference to Table 2.

[2697] FIG. 1 further provides a conceptual description of another novel bioinformatically detected viral gene of the present invention, referred to here as Viral Genomic Address Messenger 196 (VGAM196) viral gene, which modulates expression of respective host target genes thereof, the function and utility of which host target genes is known in the art.

[2698] VGAM196 is a novel bioinformatically detected regulatory, non protein coding, viral micro RNA (miRNA) gene. The method by which VGAM196 was detected is described hereinabove with reference to FIGS. 2-8.

[2699] VGAM196 gene, herein designated VGAM GENE, is a viral gene contained in the genome of Vaccinia virus. VGAM196 host target gene, herein designated VGAM HOST TARGET GENE, is a human gene contained in the human genome.

[2700] VGAM196 gene, herein designated VGAM GENE, encodes a VGAM196 precursor RNA, herein designated VGAM PRECURSOR RNA. Similar to other miRNA genes, and unlike most ordinary genes, VGAM196 precursor RNA, herein designated VGAM PRECURSOR RNA, does not encode a protein. A nucleotide sequence identical or highly similar to the nucleotide sequence of VGAM196 precursor RNA is designated SEQ ID:182, and is provided hereinbelow with reference to the sequence listing part. Nucleotide sequence SEQ ID:182 is located at position 103914 relative to the genome of Vaccinia virus.

[2701] VGAM196 precursor RNA, herein designated VGAM PRECURSOR RNA, folds onto itself, forming VGAM196 folded precursor RNA, herein designated VGAM FOLDED PRECURSOR RNA, which has a two-dimensional hairpin structure. As is well known in the art, this hairpin structure, is typical of RNA encoded by miRNA genes, and is due to the fact that the nucleotide sequence of the first half of the RNA encoded by a miRNA gene is an accurate or partial inversed-reversed sequence of the nucleotide sequence of the second half thereof.

[2702] An enzyme complex designated DICER COMPLEX, dices the VGAM196 folded precursor RNA, herein designated VGAM FOLDED PRECURSOR RNA, into VGAM196 RNA, herein designated VGAM RNA, a single stranded ˜22 nt long RNA segment. As is known in the art, dicing of a hairpin structured RNA precursor product into a short ˜22 nt RNA segment is catalyzed by an enzyme complex comprising an enzyme called Dicer together with other necessary proteins. A probable (over 84%) nucleotide sequence of VGAM196 RNA is designated SEQ ID:531, and is provided hereinbelow with reference to the sequence listing part.

[2703] VGAM196 host target gene, herein designated VGAM HOST TARGET GENE, encodes a corresponding messenger RNA, VGAM196 host target RNA, herein designated VGAM HOST TARGET RNA. VGAM196 host target RNA, herein designated VGAM HOST TARGET RNA, comprises three regions, as is typical of mRNA of a protein coding gene: a 5 untranslated region, a protein coding region and a 3 untranslated region, designated 5UTR, PROTEIN CODING and 3UTR respectively.

[2704] VGAM196 RNA, herein designated VGAM RNA, binds complementarily to one or more host target binding sites located in untranslated regions of VGAM196 host target RNA, herein designated VGAM HOST TARGET RNA. This complementary binding is due to the fact that the nucleotide sequence of VGAM196 RNA, herein designated VGAM RNA, is an accurate or a partial inversed-reversed sequence of the nucleotide sequence of each of the host target binding sites. As an illustration, FIG. 1 shows 3 such host target binding sites, designated BINDING SITE I, BINDING SITE II and BINDING SITE III respectively. It is appreciated that the number of host target binding sites shown in FIG. 1 is meant as an illustration only, and is not meant to be limiting VGAM196 RNA, herein designated VGAM RNA, may have a different number of host target binding sites in untranslated regions of a VGAM196 host target RNA, herein designated VGAM HOST TARGET RNA. It is further appreciated that while FIG. 1 depicts host target binding sites in the 3UTR region, this is meant as an example only these host target binding sites may be located in the 3UTR region, the 5UTR region, or in both 3UTR and 5UTR regions.

[2705] The complementary binding of VGAM196 RNA, herein designated VGAM RNA, to host target binding sites on VGAM196 host target RNA, herein designated VGAM HOST TARGET RNA, such as BINDING SITE I, BINDING SITE II and BINDING SITE III, inhibits translation of VGAM196 host target RNA, herein designated VGAM HOST TARGET RNA, into VGAM196 host target protein, herein designated VGAM HOST TARGET PROTEIN. VGAM host target protein is therefore outlined by a broken line.

[2706] It is appreciated that VGAM196 host target gene, herein designated VGAM HOST TARGET GENE, in fact represents a plurality of VGAM196 host target genes. The mRNA of each one of this plurality of VGAM196 host target genes comprises one or more host target binding sites, each having a nucleotide sequence which is at least partly complementary to VGAM196 RNA, herein designated VGAM RNA, and which when bound by VGAM196 RNA, herein designated VGAM RNA, causes inhibition of translation of respective one or more VGAM196 host target proteins.

[2707] It is further appreciated by one skilled in the art that the mode of translational inhibition illustrated by FIG. 1 with specific reference to translational inhibition exerted by VGAM196 gene, herein designated VGAM GENE, on one or more VGAM196 host target gene, herein designated VGAM HOST TARGET GENE, is in fact common to other known non-viral miRNA genes. As mentioned hereinabove with reference to the background section, although a specific complementary binding site has been demonstrated only for some of the known miRNA genes (primarily Lin-4 and Let-7), all other recently discovered miRNA genes are also believed by those skilled in the art to modulate expression of other genes by complementary binding, although specific complementary binding sites of these other miRNA genes have not yet been found (Ruvkun G., Perspective: Glimpses of a tiny RNA world, Science 294, 779 (2001)).

[2708] It is yet further appreciated that a function of VGAM196 is inhibition of expression of host target genes, as part of a novel viral mechanism of attacking a host. Accordingly, utilities of VGAM196 include diagnosis, prevention and treatment of viral infection by Vaccinia virus. Specific functions, and accordingly utilities, of VGAM196 correlate with, and may be deduced from, the identity of the host target genes which VGAM196 binds and inhibits, and the function of these host target genes, as elaborated hereinbelow.

[2709] Nucleotide sequences of the VGAM196 precursor RNA, herein designated VGAM PRECURSOR RNA, and of the diced VGAM196 RNA, herein designated VGAM RNA, and a schematic representation of the secondary folding of VGAM196 folded precursor RNA, herein designated VGAM FOLDED PRECURSOR RNA, of VGAM196 are further described hereinbelow with reference to Table 1.

[2710] Nucleotide sequences of host target binding sites, such as BINDING SITE-I, BINDING SITE-II and BINDING SITE-III of FIG. 1, found on, and schematic representation of the complementarity of each of these host target binding sites to VGAM196 RNA, herein designated VGAM RNA, are described hereinbelow with reference to Table 2.

[2711] FIG. 1 further provides a conceptual description of another novel bioinformatically detected viral gene of the present invention, referred to here as Viral Genomic Address Messenger 197 (VGAM197) viral gene, which modulates expression of respective host target genes thereof, the function and utility of which host target genes is known in the art.

[2712] VGAM197 is a novel bioinformatically detected regulatory, non protein coding, viral micro RNA (miRNA) gene. The method by which VGAM197 was detected is described hereinabove with reference to FIGS. 2-8.

[2713] VGAM197 gene, herein designated VGAM GENE, is a viral gene contained in the genome of Vaccinia virus. VGAM197 host target gene, herein designated VGAM HOST TARGET GENE, is a human gene contained in the human genome.

[2714] VGAM197 gene, herein designated VGAM GENE, encodes a VGAM197 precursor RNA, herein designated VGAM PRECURSOR RNA. Similar to other miRNA genes, and unlike most ordinary genes, VGAM197 precursor RNA, herein designated VGAM PRECURSOR RNA, does not encode a protein. A nucleotide sequence identical or highly similar to the nucleotide sequence of VGAM197 precursor RNA is designated SEQ ID:183, and is provided hereinbelow with reference to the sequence listing part. Nucleotide sequence SEQ ID:183 is located at position 104417 relative to the genome of Vaccinia virus.

[2715] VGAM197 precursor RNA, herein designated VGAM PRECURSOR RNA, folds onto itself, forming VGAM197 folded precursor RNA, herein designated VGAM FOLDED PRECURSOR RNA, which has a two-dimensional hairpin structure. As is well known in the art, this hairpin structure, is typical of RNA encoded by miRNA genes, and is due to the fact that the nucleotide sequence of the first half of the RNA encoded by a miRNA gene is an accurate or partial inversed-reversed sequence of the nucleotide sequence of the second half thereof.

[2716] An enzyme complex designated DICER COMPLEX, dices the VGAM197 folded precursor RNA, herein designated VGAM FOLDED PRECURSOR RNA, into VGAM197 RNA, herein designated VGAM RNA, a single stranded ˜22 nt long RNA segment. As is known in the art, dicing of a hairpin structured RNA precursor product into a short ˜22 nt RNA segment is catalyzed by an enzyme complex comprising an enzyme called Dicer together with other necessary proteins. A probable (over 84%) nucleotide sequence of VGAM197 RNA is designated SEQ ID:532, and is provided hereinbelow with reference to the sequence listing part.

[2717] VGAM197 host target gene, herein designated VGAM HOST TARGET GENE, encodes a corresponding messenger RNA, VGAM197 host target RNA, herein designated VGAM HOST TARGET RNA. VGAM197 host target RNA, herein designated VGAM HOST TARGET RNA, comprises three regions, as is typical of mRNA of a protein coding gene: a 5 untranslated region, a protein coding region and a 3 untranslated region, designated 5UTR, PROTEIN CODING and 3UTR respectively.

[2718] VGAM197 RNA, herein designated VGAM RNA, binds complementarily to one or more host target binding sites located in untranslated regions of VGAM197 host target RNA, herein designated VGAM HOST TARGET RNA. This complementary binding is due to the fact that the nucleotide sequence of VGAM197 RNA, herein designated VGAM RNA, is an accurate or a partial inversed-reversed sequence of the nucleotide sequence of each of the host target binding sites. As an illustration, FIG. 1 shows 3 such host target binding sites, designated BINDING SITE I, BINDING SITE II and BINDING SITE III respectively. It is appreciated that the number of host target binding sites shown in FIG. 1 is meant as an illustration only, and is not meant to be limiting VGAM197 RNA, herein designated VGAM RNA, may have a different number of host target binding sites in untranslated regions of a VGAM197 host target RNA, herein designated VGAM HOST TARGET RNA. It is further appreciated that while FIG. 1 depicts host target binding sites in the 3UTR region, this is meant as an example only these host target binding sites may be located in the 3UTR region, the 5UTR region, or in both 3UTR and 5UTR regions.

[2719] The complementary binding of VGAM197 RNA, herein designated VGAM RNA, to host target binding sites on VGAM197 host target RNA, herein designated VGAM HOST TARGET RNA, such as BINDING SITE I, BINDING SITE II and BINDING SITE III, inhibits translation of VGAM197 host target RNA, herein designated VGAM HOST TARGET RNA, into VGAM197 host target protein, herein designated VGAM HOST TARGET PROTEIN. VGAM host target protein is therefore outlined by a broken line.

[2720] It is appreciated that VGAM197 host target gene, herein designated VGAM HOST TARGET GENE, in fact represents a plurality of VGAM197 host target genes. The mRNA of each one of this plurality of VGAM197 host target genes comprises one or more host target binding sites, each having a nucleotide sequence which is at least partly complementary to VGAM197 RNA, herein designated VGAM RNA, and which when bound by VGAM197 RNA, herein designated VGAM RNA, causes inhibition of translation of respective one or more VGAM197 host target proteins.

[2721] It is further appreciated by one skilled in the art that the mode of translational inhibition illustrated by FIG. 1 with specific reference to translational inhibition exerted by VGAM197 gene, herein designated VGAM GENE, on one or more VGAM197 host target gene, herein designated VGAM HOST TARGET GENE, is in fact common to other known non-viral miRNA genes. As mentioned hereinabove with reference to the background section, although a specific complementary binding site has been demonstrated only for some of the known miRNA genes (primarily Lin-4 and Let-7), all other recently discovered miRNA genes are also believed by those skilled in the art to modulate expression of other genes by complementary binding, although specific complementary binding sites of these other miRNA genes have not yet been found (Ruvkun G., Perspective: Glimpses of a tiny RNA world, Science 294, 779 (2001)).

[2722] It is yet further appreciated that a function of VGAM197 is inhibition of expression of host target genes, as part of a novel viral mechanism of attacking a host. Accordingly, utilities of VGAM197 include diagnosis, prevention and treatment of viral infection by Vaccinia virus. Specific functions, and accordingly utilities, of VGAM197 correlate with, and may be deduced from, the identity of the host target genes which VGAM197 binds and inhibits, and the function of these host target genes, as elaborated hereinbelow.

[2723] Nucleotide sequences of the VGAM197 precursor RNA, herein designated VGAM PRECURSOR RNA, and of the diced VGAM197 RNA, herein designated VGAM RNA, and a schematic representation of the secondary folding of VGAM197 folded precursor RNA, herein designated VGAM FOLDED PRECURSOR RNA, of VGAM197 are further described hereinbelow with reference to Table 1.

[2724] Nucleotide sequences of host target binding sites, such as BINDING SITE-I, BINDING SITE-II and BINDING SITE-III of FIG. 1, found on, and schematic representation of the complementarity of each of these host target binding sites to VGAM197 RNA, herein designated VGAM RNA, are described hereinbelow with reference to Table 2.

[2725] FIG. 1 further provides a conceptual description of another novel bioinformatically detected viral gene of the present invention, referred to here as Viral Genomic Address Messenger 198 (VGAM198) viral gene, which modulates expression of respective host target genes thereof, the function and utility of which host target genes is known in the art.

[2726] VGAM198 is a novel bioinformatically detected regulatory, non protein coding, viral micro RNA (miRNA) gene. The method by which VGAM198 was detected is described hereinabove with reference to FIGS. 2-8.

[2727] VGAM198 gene, herein designated VGAM GENE, is a viral gene contained in the genome of Vaccinia virus. VGAM198 host target gene, herein designated VGAM HOST TARGET GENE, is a human gene contained in the human genome.

[2728] VGAM198 gene, herein designated VGAM GENE, encodes a VGAM198 precursor RNA, herein designated VGAM PRECURSOR RNA. Similar to other miRNA genes, and unlike most ordinary genes, VGAM198 precursor RNA, herein designated VGAM PRECURSOR RNA, does not encode a protein. A nucleotide sequence identical or highly similar to the nucleotide sequence of VGAM198 precursor RNA is designated SEQ ID:184, and is provided hereinbelow with reference to the sequence listing part. Nucleotide sequence SEQ ID:184 is located at position 106759 relative to the genome of Vaccinia virus.

[2729] VGAM198 precursor RNA, herein designated VGAM PRECURSOR RNA, folds onto itself, forming VGAM198 folded precursor RNA, herein designated VGAM FOLDED PRECURSOR RNA, which has a two-dimensional hairpin structure. As is well known in the art, this hairpin structure, is typical of RNA encoded by miRNA genes, and is due to the fact that the nucleotide sequence of the first half of the RNA encoded by a miRNA gene is an accurate or partial inversed-reversed sequence of the nucleotide sequence of the second half thereof.

[2730] An enzyme complex designated DICER COMPLEX, dices the VGAM198 folded precursor RNA, herein designated VGAM FOLDED PRECURSOR RNA, into VGAM198 RNA, herein designated VGAM RNA, a single stranded ˜22 nt long RNA segment. As is known in the art, dicing of a hairpin structured RNA precursor product into a short ˜22 nt RNA segment is catalyzed by an enzyme complex comprising an enzyme called Dicer together with other necessary proteins. A probable (over 25%) nucleotide sequence of VGAM198 RNA is designated SEQ ID:533, and is provided hereinbelow with reference to the sequence listing part.

[2731] VGAM198 host target gene, herein designated VGAM HOST TARGET GENE, encodes a corresponding messenger RNA, VGAM198 host target RNA, herein designated VGAM HOST TARGET RNA. VGAM198 host target RNA, herein designated VGAM HOST TARGET RNA, comprises three regions, as is typical of mRNA of a protein coding gene: a 5 untranslated region, a protein coding region and a 3 untranslated region, designated 5UTR, PROTEIN CODING and 3UTR respectively.

[2732] VGAM198 RNA, herein designated VGAM RNA, binds complementarily to one or more host target binding sites located in untranslated regions of VGAM198 host target RNA, herein designated VGAM HOST TARGET RNA. This complementary binding is due to the fact that the nucleotide sequence of VGAM198 RNA, herein designated VGAM RNA, is an accurate or a partial inversed-reversed sequence of the nucleotide sequence of each of the host target binding sites. As an illustration, FIG. 1 shows 3 such host target binding sites, designated BINDING SITE I, BINDING SITE II and BINDING SITE III respectively. It is appreciated that the number of host target binding sites shown in FIG. 1 is meant as an illustration only, and is not meant to be limiting VGAM198 RNA, herein designated VGAM RNA, may have a different number of host target binding sites in untranslated regions of a VGAM198 host target RNA, herein designated VGAM HOST TARGET RNA. It is further appreciated that while FIG. 1 depicts host target binding sites in the 3UTR region, this is meant as an example only these host target binding sites may be located in the 3UTR region, the 5UTR region, or in both 3UTR and 5UTR regions.

[2733] The complementary binding of VGAM198 RNA, herein designated VGAM RNA, to host target binding sites on VGAM198 host target RNA, herein designated VGAM HOST TARGET RNA, such as BINDING SITE I, BINDING SITE II and BINDING SITE III, inhibits translation of VGAM198 host target RNA, herein designated VGAM HOST TARGET RNA, into VGAM198 host target protein, herein designated VGAM HOST TARGET PROTEIN. VGAM host target protein is therefore outlined by a broken line.

[2734] It is appreciated that VGAM198 host target gene, herein designated VGAM HOST TARGET GENE, in fact represents a plurality of VGAM198 host target genes. The mRNA of each one of this plurality of VGAM198 host target genes comprises one or more host target binding sites, each having a nucleotide sequence which is at least partly complementary to VGAM198 RNA, herein designated VGAM RNA, and which when bound by VGAM198 RNA, herein designated VGAM RNA, causes inhibition of translation of respective one or more VGAM198 host target proteins.

[2735] It is further appreciated by one skilled in the art that the mode of translational inhibition illustrated by FIG. 1 with specific reference to translational inhibition exerted by VGAM198 gene, herein designated VGAM GENE, on one or more VGAM198 host target gene, herein designated VGAM HOST TARGET GENE, is in fact common to other known non-viral miRNA genes. As mentioned hereinabove with reference to the background section, although a specific complementary binding site has been demonstrated only for some of the known miRNA genes (primarily Lin-4 and Let-7), all other recently discovered miRNA genes are also believed by those skilled in the art to modulate expression of other genes by complementary binding, although specific complementary binding sites of these other miRNA genes have not yet been found (Ruvkun G., Perspective: Glimpses of a tiny RNA world, Science 294, 779 (2001)).

[2736] It is yet further appreciated that a function of VGAM198 is inhibition of expression of host target genes, as part of a novel viral mechanism of attacking a host. Accordingly, utilities of VGAM198 include diagnosis, prevention and treatment of viral infection by Vaccinia virus. Specific functions, and accordingly utilities, of VGAM198 correlate with, and may be deduced from, the identity of the host target genes which VGAM198 binds and inhibits, and the function of these host target genes, as elaborated hereinbelow.

[2737] Nucleotide sequences of the VGAM198 precursor RNA, herein designated VGAM PRECURSOR RNA, and of the diced VGAM198 RNA, herein designated VGAM RNA, and a schematic representation of the secondary folding of VGAM198 folded precursor RNA, herein designated VGAM FOLDED PRECURSOR RNA, of VGAM198 are further described hereinbelow with reference to Table 1.

[2738] Nucleotide sequences of host target binding sites, such as BINDING SITE-I, BINDING SITE-II and BINDING SITE-III of FIG. 1, found on, and schematic representation of the complementarity of each of these host target binding sites to VGAM198 RNA, herein designated VGAM RNA, are described hereinbelow with reference to Table 2.

[2739] FIG. 1 further provides a conceptual description of another novel bioinformatically detected viral gene of the present invention, referred to here as Viral Genomic Address Messenger 199 (VGAM199) viral gene, which modulates expression of respective host target genes thereof, the function and utility of which host target genes is known in the art.

[2740] VGAM199 is a novel bioinformatically detected regulatory, non protein coding, viral micro RNA (miRNA) gene. The method by which VGAM199 was detected is described hereinabove with reference to FIGS. 2-8.

[2741] VGAM199 gene, herein designated VGAM GENE, is a viral gene contained in the genome of Vaccinia virus. VGAM199 host target gene, herein designated VGAM HOST TARGET GENE, is a human gene contained in the human genome.

[2742] VGAM199 gene, herein designated VGAM GENE, encodes a VGAM199 precursor RNA, herein designated VGAM PRECURSOR RNA. Similar to other miRNA genes, and unlike most ordinary genes, VGAM199 precursor RNA, herein designated VGAM PRECURSOR RNA, does not encode a protein. A nucleotide sequence identical or highly similar to the nucleotide sequence of VGAM199 precursor RNA is designated SEQ ID:185, and is provided hereinbelow with reference to the sequence listing part. Nucleotide sequence SEQ ID:185 is located at position 106596 relative to the genome of Vaccinia virus.

[2743] VGAM199 precursor RNA, herein designated VGAM PRECURSOR RNA, folds onto itself, forming VGAM199 folded precursor RNA, herein designated VGAM FOLDED PRECURSOR RNA, which has a two-dimensional hairpin structure. As is well known in the art, this hairpin structure, is typical of RNA encoded by miRNA genes, and is due to the fact that the nucleotide sequence of the first half of the RNA encoded by a miRNA gene is an accurate or partial inversed-reversed sequence of the nucleotide sequence of the second half thereof.

[2744] An enzyme complex designated DICER COMPLEX, dices the VGAM199 folded precursor RNA, herein designated VGAM FOLDED PRECURSOR RNA, into VGAM199 RNA, herein designated VGAM RNA, a single stranded ˜22 nt long RNA segment. As is known in the art, dicing of a hairpin structured RNA precursor product into a short ˜22 nt RNA segment is catalyzed by an enzyme complex comprising an enzyme called Dicer together with other necessary proteins. A probable (over 78%) nucleotide sequence of VGAM199 RNA is designated SEQ ID:534, and is provided hereinbelow with reference to the sequence listing part.

[2745] VGAM199 host target gene, herein designated VGAM HOST TARGET GENE, encodes a corresponding messenger RNA, VGAM199 host target RNA, herein designated VGAM HOST TARGET RNA. VGAM199 host target RNA, herein designated VGAM HOST TARGET RNA, comprises three regions, as is typical of mRNA of a protein coding gene: a 5 untranslated region, a protein coding region and a 3 untranslated region, designated 5UTR, PROTEIN CODING and 3UTR respectively.

[2746] VGAM199 RNA, herein designated VGAM RNA, binds complementarily to one or more host target binding sites located in untranslated regions of VGAM199 host target RNA, herein designated VGAM HOST TARGET RNA. This complementary binding is due to the fact that the nucleotide sequence of VGAM199 RNA, herein designated VGAM RNA, is an accurate or a partial inversed-reversed sequence of the nucleotide sequence of each of the host target binding sites. As an illustration, FIG. 1 shows 3 such host target binding sites, designated BINDING SITE I, BINDING SITE II and BINDING SITE III respectively. It is appreciated that the number of host target binding sites shown in FIG. 1 is meant as an illustration only, and is not meant to be limiting VGAM199 RNA, herein designated VGAM RNA, may have a different number of host target binding sites in untranslated regions of a VGAM199 host target RNA, herein designated VGAM HOST TARGET RNA. It is further appreciated that while FIG. 1 depicts host target binding sites in the 3UTR region, this is meant as an example only these host target binding sites may be located in the 3UTR region, the 5UTR region, or in both 3UTR and 5UTR regions.

[2747] The complementary binding of VGAM199 RNA, herein designated VGAM RNA, to host target binding sites on VGAM199 host target RNA, herein designated VGAM HOST TARGET RNA, such as BINDING SITE I, BINDING SITE II and BINDING SITE III, inhibits translation of VGAM199 host target RNA, herein designated VGAM HOST TARGET RNA, into VGAM199 host target protein, herein designated VGAM HOST TARGET PROTEIN. VGAM host target protein is therefore outlined by a broken line.

[2748] It is appreciated that VGAM199 host target gene, herein designated VGAM HOST TARGET GENE, in fact represents a plurality of VGAM199 host target genes. The mRNA of each one of this plurality of VGAM199 host target genes comprises one or more host target binding sites, each having a nucleotide sequence which is at least partly complementary to VGAM199 RNA, herein designated VGAM RNA, and which when bound by VGAM199 RNA, herein designated VGAM RNA, causes inhibition of translation of respective one or more VGAM199 host target proteins.

[2749] It is further appreciated by one skilled in the art that the mode of translational inhibition illustrated by FIG. 1 with specific reference to translational inhibition exerted by VGAM199 gene, herein designated VGAM GENE, on one or more VGAM199 host target gene, herein designated VGAM HOST TARGET GENE, is in fact common to other known non-viral miRNA genes. As mentioned hereinabove with reference to the background section, although a specific complementary binding site has been demonstrated only for some of the known miRNA genes (primarily Lin-4 and Let-7), all other recently discovered miRNA genes are also believed by those skilled in the art to modulate expression of other genes by complementary binding, although specific complementary binding sites of these other miRNA genes have not yet been found (Ruvkun G., Perspective: Glimpses of a tiny RNA world, Science 294, 779 (2001)).

[2750] It is yet further appreciated that a function of VGAM199 is inhibition of expression of host target genes, as part of a novel viral mechanism of attacking a host. Accordingly, utilities of VGAM199 include diagnosis, prevention and treatment of viral infection by Vaccinia virus. Specific functions, and accordingly utilities, of VGAM199 correlate with, and may be deduced from, the identity of the host target genes which VGAM199 binds and inhibits, and the function of these host target genes, as elaborated hereinbelow.

[2751] Nucleotide sequences of the VGAM199 precursor RNA, herein designated VGAM PRECURSOR RNA, and of the diced VGAM199 RNA, herein designated VGAM RNA, and a schematic representation of the secondary folding of VGAM199 folded precursor RNA, herein designated VGAM FOLDED PRECURSOR RNA, of VGAM199 are further described hereinbelow with reference to Table 1.

[2752] Nucleotide sequences of host target binding sites, such as BINDING SITE-I, BINDING SITE-II and BINDING SITE-III of FIG. 1, found on, and schematic representation of the complementarity of each of these host target binding sites to VGAM199 RNA, herein designated VGAM RNA, are described hereinbelow with reference to Table 2.

[2753] FIG. 1 further provides a conceptual description of another novel bioinformatically detected viral gene of the present invention, referred to here as Viral Genomic Address Messenger 200 (VGAM200) viral gene, which modulates expression of respective host target genes thereof, the function and utility of which host target genes is known in the art.

[2754] VGAM200 is a novel bioinformatically detected regulatory, non protein coding, viral micro RNA (miRNA) gene. The method by which VGAM200 was detected is described hereinabove with reference to FIGS. 2-8.

[2755] VGAM200 gene, herein designated VGAM GENE, is a viral gene contained in the genome of Vaccinia virus. VGAM200 host target gene, herein designated VGAM HOST TARGET GENE, is a human gene contained in the human genome.

[2756] VGAM200 gene, herein designated VGAM GENE, encodes a VGAM200 precursor RNA, herein designated VGAM PRECURSOR RNA. Similar to other miRNA genes, and unlike most ordinary genes, VGAM200 precursor RNA, herein designated VGAM PRECURSOR RNA, does not encode a protein. A nucleotide sequence identical or highly similar to the nucleotide sequence of VGAM200 precursor RNA is designated SEQ ID:186, and is provided hereinbelow with reference to the sequence listing part. Nucleotide sequence SEQ ID:186 is located at position 106423 relative to the genome of Vaccinia virus.

[2757] VGAM200 precursor RNA, herein designated VGAM PRECURSOR RNA, folds onto itself, forming VGAM200 folded precursor RNA, herein designated VGAM FOLDED PRECURSOR RNA, which has a two-dimensional hairpin structure. As is well known in the art, this hairpin structure, is typical of RNA encoded by miRNA genes, and is due to the fact that the nucleotide sequence of the first half of the RNA encoded by a miRNA gene is an accurate or partial inversed-reversed sequence of the nucleotide sequence of the second half thereof.

[2758] An enzyme complex designated DICER COMPLEX, dices the VGAM200 folded precursor RNA, herein designated VGAM FOLDED PRECURSOR RNA, into VGAM200 RNA, herein designated VGAM RNA, a single stranded ˜22 nt long RNA segment. As is known in the art, dicing of a hairpin structured RNA precursor product into a short ˜22 nt RNA segment is catalyzed by an enzyme complex comprising an enzyme called Dicer together with other necessary proteins. A probable (over 75%) nucleotide sequence of VGAM200 RNA is designated SEQ ID:535, and is provided hereinbelow with reference to the sequence listing part.

[2759] VGAM200 host target gene, herein designated VGAM HOST TARGET GENE, encodes a corresponding messenger RNA, VGAM200 host target RNA, herein designated VGAM HOST TARGET RNA. VGAM200 host target RNA, herein designated VGAM HOST TARGET RNA, comprises three regions, as is typical of mRNA of a protein coding gene: a 5 untranslated region, a protein coding region and a 3 untranslated region, designated 5UTR, PROTEIN CODING and 3UTR respectively.

[2760] VGAM200 RNA, herein designated VGAM RNA, binds complementarily to one or more host target binding sites located in untranslated regions of VGAM200 host target RNA, herein designated VGAM HOST TARGET RNA. This complementary binding is due to the fact that the nucleotide sequence of VGAM200 RNA, herein designated VGAM RNA, is an accurate or a partial inversed-reversed sequence of the nucleotide sequence of each of the host target binding sites. As an illustration, FIG. 1 shows 3 such host target binding sites, designated BINDING SITE I, BINDING SITE II and BINDING SITE III respectively. It is appreciated that the number of host target binding sites shown in FIG. 1 is meant as an illustration only, and is not meant to be limiting VGAM200 RNA, herein designated VGAM RNA, may have a different number of host target binding sites in untranslated regions of a VGAM200 host target RNA, herein designated VGAM HOST TARGET RNA. It is further appreciated that while FIG. 1 depicts host target binding sites in the 3UTR region, this is meant as an example only these host target binding sites may be located in the 3UTR region, the 5UTR region, or in both 3UTR and 5UTR regions.

[2761] The complementary binding of VGAM200 RNA, herein designated VGAM RNA, to host target binding sites on VGAM200 host target RNA, herein designated VGAM HOST TARGET RNA, such as BINDING SITE I, BINDING SITE II and BINDING SITE III, inhibits translation of VGAM200 host target RNA, herein designated VGAM HOST TARGET RNA, into VGAM200 host target protein, herein designated VGAM HOST TARGET PROTEIN. VGAM host target protein is therefore outlined by a broken line.

[2762] It is appreciated that VGAM200 host target gene, herein designated VGAM HOST TARGET GENE, in fact represents a plurality of VGAM200 host target genes. The mRNA of each one of this plurality of VGAM200 host target genes comprises one or more host target binding sites, each having a nucleotide sequence which is at least partly complementary to VGAM200 RNA, herein designated VGAM RNA, and which when bound by VGAM200 RNA, herein designated VGAM RNA, causes inhibition of translation of respective one or more VGAM200 host target proteins.

[2763] It is further appreciated by one skilled in the art that the mode of translational inhibition illustrated by FIG. 1 with specific reference to translational inhibition exerted by VGAM200 gene, herein designated VGAM GENE, on one or more VGAM200 host target gene, herein designated VGAM HOST TARGET GENE, is in fact common to other known non-viral miRNA genes. As mentioned hereinabove with reference to the background section, although a specific complementary binding site has been demonstrated only for some of the known miRNA genes (primarily Lin-4 and Let-7), all other recently discovered miRNA genes are also believed by those skilled in the art to modulate expression of other genes by complementary binding, although specific complementary binding sites of these other miRNA genes have not yet been found (Ruvkun G., Perspective: Glimpses of a tiny RNA world, Science 294, 779 (2001)).

[2764] It is yet further appreciated that a function of VGAM200 is inhibition of expression of host target genes, as part of a novel viral mechanism of attacking a host. Accordingly, utilities of VGAM200 include diagnosis, prevention and treatment of viral infection by Vaccinia virus. Specific functions, and accordingly utilities, of VGAM200 correlate with, and may be deduced from, the identity of the host target genes which VGAM200 binds and inhibits, and the function of these host target genes, as elaborated hereinbelow.

[2765] Nucleotide sequences of the VGAM200 precursor RNA, herein designated VGAM PRECURSOR RNA, and of the diced VGAM200 RNA, herein designated VGAM RNA, and a schematic representation of the secondary folding of VGAM200 folded precursor RNA, herein designated VGAM FOLDED PRECURSOR RNA, of VGAM200 are further described hereinbelow with reference to Table 1.

[2766] Nucleotide sequences of host target binding sites, such as BINDING SITE-I, BINDING SITE-II and BINDING SITE-III of FIG. 1, found on, and schematic representation of the complementarity of each of these host target binding sites to VGAM200 RNA, herein designated VGAM RNA, are described hereinbelow with reference to Table 2.

[2767] FIG. 1 further provides a conceptual description of another novel bioinformatically detected viral gene of the present invention, referred to here as Viral Genomic Address Messenger 201 (VGAM201) viral gene, which modulates expression of respective host target genes thereof, the function and utility of which host target genes is known in the art.

[2768] VGAM201 is a novel bioinformatically detected regulatory, non protein coding, viral micro RNA (miRNA) gene. The method by which VGAM201 was detected is described hereinabove with reference to FIGS. 2-8.

[2769] VGAM201 gene, herein designated VGAM GENE, is a viral gene contained in the genome of Vaccinia virus. VGAM201 host target gene, herein designated VGAM HOST TARGET GENE, is a human gene contained in the human genome.

[2770] VGAM201 gene, herein designated VGAM GENE, encodes a VGAM201 precursor RNA, herein designated VGAM PRECURSOR RNA. Similar to other miRNA genes, and unlike most ordinary genes, VGAM201 precursor RNA, herein designated VGAM PRECURSOR RNA, does not encode a protein. A nucleotide sequence identical or highly similar to the nucleotide sequence of VGAM201 precursor RNA is designated SEQ ID:187, and is provided hereinbelow with reference to the sequence listing part. Nucleotide sequence SEQ ID:187 is located at position 107873 relative to the genome of Vaccinia virus.

[2771] VGAM201 precursor RNA, herein designated VGAM PRECURSOR RNA, folds onto itself, forming VGAM201 folded precursor RNA, herein designated VGAM FOLDED PRECURSOR RNA, which has a two-dimensional hairpin structure. As is well known in the art, this hairpin structure, is typical of RNA encoded by miRNA genes, and is due to the fact that the nucleotide sequence of the first half of the RNA encoded by a miRNA gene is an accurate or partial inversed-reversed sequence of the nucleotide sequence of the second half thereof.

[2772] An enzyme complex designated DICER COMPLEX, dices the VGAM201 folded precursor RNA, herein designated VGAM FOLDED PRECURSOR RNA, into VGAM201 RNA, herein designated VGAM RNA, a single stranded ˜22 nt long RNA segment. As is known in the art, dicing of a hairpin structured RNA precursor product into a short ˜22 nt RNA segment is catalyzed by an enzyme complex comprising an enzyme called Dicer together with other necessary proteins. A probable (over 80%) nucleotide sequence of VGAM201 RNA is designated SEQ ID:536, and is provided hereinbelow with reference to the sequence listing part.

[2773] VGAM201 host target gene, herein designated VGAM HOST TARGET GENE, encodes a corresponding messenger RNA, VGAM201 host target RNA, herein designated VGAM HOST TARGET RNA. VGAM201 host target RNA, herein designated VGAM HOST TARGET RNA, comprises three regions, as is typical of mRNA of a protein coding gene: a 5 untranslated region, a protein coding region and a 3 untranslated region, designated 5UTR, PROTEIN CODING and 3UTR respectively.

[2774] VGAM201 RNA, herein designated VGAM RNA, binds complementarily to one or more host target binding sites located in untranslated regions of VGAM201 host target RNA, herein designated VGAM HOST TARGET RNA. This complementary binding is due to the fact that the nucleotide sequence of VGAM201 RNA, herein designated VGAM RNA, is an accurate or a partial inversed-reversed sequence of the nucleotide sequence of each of the host target binding sites. As an illustration, FIG. 1 shows 3 such host target binding sites, designated BINDING SITE I, BINDING SITE II and BINDING SITE III respectively. It is appreciated that the number of host target binding sites shown in FIG. 1 is meant as an illustration only, and is not meant to be limiting VGAM201 RNA, herein designated VGAM RNA, may have a different number of host target binding sites in untranslated regions of a VGAM201 host target RNA, herein designated VGAM HOST TARGET RNA. It is further appreciated that while FIG. 1 depicts host target binding sites in the 3UTR region, this is meant as an example only these host target binding sites may be located in the 3UTR region, the 5UTR region, or in both 3UTR and 5UTR regions.

[2775] The complementary binding of VGAM201 RNA, herein designated VGAM RNA, to host target binding sites on VGAM201 host target RNA, herein designated VGAM HOST TARGET RNA, such as BINDING SITE I, BINDING SITE II and BINDING SITE III, inhibits translation of VGAM201 host target RNA, herein designated VGAM HOST TARGET RNA, into VGAM201 host target protein, herein designated VGAM HOST TARGET PROTEIN. VGAM host target protein is therefore outlined by a broken line.

[2776] It is appreciated that VGAM201 host target gene, herein designated VGAM HOST TARGET GENE, in fact represents a plurality of VGAM201 host target genes. The mRNA of each one of this plurality of VGAM201 host target genes comprises one or more host target binding sites, each having a nucleotide sequence which is at least partly complementary to VGAM201 RNA, herein designated VGAM RNA, and which when bound by VGAM201 RNA, herein designated VGAM RNA, causes inhibition of translation of respective one or more VGAM201 host target proteins.

[2777] It is further appreciated by one skilled in the art that the mode of translational inhibition illustrated by FIG. 1 with specific reference to translational inhibition exerted by VGAM201 gene, herein designated VGAM GENE, on one or more VGAM201 host target gene, herein designated VGAM HOST TARGET GENE, is in fact common to other known non-viral miRNA genes. As mentioned hereinabove with reference to the background section, although a specific complementary binding site has been demonstrated only for some of the known miRNA genes (primarily Lin-4 and Let-7), all other recently discovered miRNA genes are also believed by those skilled in the art to modulate expression of other genes by complementary binding, although specific complementary binding sites of these other miRNA genes have not yet been found (Ruvkun G., Perspective: Glimpses of a tiny RNA world, Science 294, 779 (2001)).

[2778] It is yet further appreciated that a function of VGAM201 is inhibition of expression of host target genes, as part of a novel viral mechanism of attacking a host. Accordingly, utilities of VGAM201 include diagnosis, prevention and treatment of viral infection by Vaccinia virus. Specific functions, and accordingly utilities, of VGAM201 correlate with, and may be deduced from, the identity of the host target genes which VGAM201 binds and inhibits, and the function of these host target genes, as elaborated hereinbelow.

[2779] Nucleotide sequences of the VGAM201 precursor RNA, herein designated VGAM PRECURSOR RNA, and of the diced VGAM201 RNA, herein designated VGAM RNA, and a schematic representation of the secondary folding of VGAM201 folded precursor RNA, herein designated VGAM FOLDED PRECURSOR RNA, of VGAM201 are further described hereinbelow with reference to Table 1.

[2780] Nucleotide sequences of host target binding sites, such as BINDING SITE-I, BINDING SITE-II and BINDING SITE-III of FIG. 1, found on, and schematic representation of the complementarity of each of these host target binding sites to VGAM201 RNA, herein designated VGAM RNA, are described hereinbelow with reference to Table 2.

[2781] FIG. 1 further provides a conceptual description of another novel bioinformatically detected viral gene of the present invention, referred to here as Viral Genomic Address Messenger 202 (VGAM202) viral gene, which modulates expression of respective host target genes thereof, the function and utility of which host target genes is known in the art.

[2782] VGAM202 is a novel bioinformatically detected regulatory, non protein coding, viral micro RNA (miRNA) gene. The method by which VGAM202 was detected is described hereinabove with reference to FIGS. 2-8.

[2783] VGAM202 gene, herein designated VGAM GENE, is a viral gene contained in the genome of Vaccinia virus. VGAM202 host target gene, herein designated VGAM HOST TARGET GENE, is a human gene contained in the human genome.

[2784] VGAM202 gene, herein designated VGAM GENE, encodes a VGAM202 precursor RNA, herein designated VGAM PRECURSOR RNA. Similar to other miRNA genes, and unlike most ordinary genes, VGAM202 precursor RNA, herein designated VGAM PRECURSOR RNA, does not encode a protein. A nucleotide sequence identical or highly similar to the nucleotide sequence of VGAM202 precursor RNA is designated SEQ ID:188, and is provided hereinbelow with reference to the sequence listing part. Nucleotide sequence SEQ ID:188 is located at position 108007 relative to the genome of Vaccinia virus.

[2785] VGAM202 precursor RNA, herein designated VGAM PRECURSOR RNA, folds onto itself, forming VGAM202 folded precursor RNA, herein designated VGAM FOLDED PRECURSOR RNA, which has a two-dimensional hairpin structure. As is well known in the art, this hairpin structure, is typical of RNA encoded by miRNA genes, and is due to the fact that the nucleotide sequence of the first half of the RNA encoded by a miRNA gene is an accurate or partial inversed-reversed sequence of the nucleotide sequence of the second half thereof.

[2786] An enzyme complex designated DICER COMPLEX, dices the VGAM202 folded precursor RNA, herein designated VGAM FOLDED PRECURSOR RNA, into VGAM202 RNA, herein designated VGAM RNA, a single stranded ˜22 nt long RNA segment. As is known in the art, dicing of a hairpin structured RNA precursor product into a short ˜22 nt RNA segment is catalyzed by an enzyme complex comprising an enzyme called Dicer together with other necessary proteins. A probable (over 87%) nucleotide sequence of VGAM202 RNA is designated SEQ ID:537, and is provided hereinbelow with reference to the sequence listing part.

[2787] VGAM202 host target gene, herein designated VGAM HOST TARGET GENE, encodes a corresponding messenger RNA, VGAM202 host target RNA, herein designated VGAM HOST TARGET RNA. VGAM202 host target RNA, herein designated VGAM HOST TARGET RNA, comprises three regions, as is typical of mRNA of a protein coding gene: a 5 untranslated region, a protein coding region and a 3 untranslated region, designated 5UTR, PROTEIN CODING and 3UTR respectively.

[2788] VGAM202 RNA, herein designated VGAM RNA, binds complementarily to one or more host target binding sites located in untranslated regions of VGAM202 host target RNA, herein designated VGAM HOST TARGET RNA. This complementary binding is due to the fact that the nucleotide sequence of VGAM202 RNA, herein designated VGAM RNA, is an accurate or a partial inversed-reversed sequence of the nucleotide sequence of each of the host target binding sites. As an illustration, FIG. 1 shows 3 such host target binding sites, designated BINDING SITE I, BINDING SITE II and BINDING SITE III respectively. It is appreciated that the number of host target binding sites shown in FIG. 1 is meant as an illustration only, and is not meant to be limiting VGAM202 RNA, herein designated VGAM RNA, may have a different number of host target binding sites in untranslated regions of a VGAM202 host target RNA, herein designated VGAM HOST TARGET RNA. It is further appreciated that while FIG. 1 depicts host target binding sites in the 3UTR region, this is meant as an example only these host target binding sites may be located in the 3UTR region, the 5UTR region, or in both 3UTR and 5UTR regions.

[2789] The complementary binding of VGAM202 RNA, herein designated VGAM RNA, to host target binding sites on VGAM202 host target RNA, herein designated VGAM HOST TARGET RNA, such as BINDING SITE I, BINDING SITE II and BINDING SITE III, inhibits translation of VGAM202 host target RNA, herein designated VGAM HOST TARGET RNA, into VGAM202 host target protein, herein designated VGAM HOST TARGET PROTEIN. VGAM host target protein is therefore outlined by a broken line.

[2790] It is appreciated that VGAM202 host target gene, herein designated VGAM HOST TARGET GENE, in fact represents a plurality of VGAM202 host target genes. The mRNA of each one of this plurality of VGAM202 host target genes comprises one or more host target binding sites, each having a nucleotide sequence which is at least partly complementary to VGAM202 RNA, herein designated VGAM RNA, and which when bound by VGAM202 RNA, herein designated VGAM RNA, causes inhibition of translation of respective one or more VGAM202 host target proteins.

[2791] It is further appreciated by one skilled in the art that the mode of translational inhibition illustrated by FIG. 1 with specific reference to translational inhibition exerted by VGAM202 gene, herein designated VGAM GENE, on one or more VGAM202 host target gene, herein designated VGAM HOST TARGET GENE, is in fact common to other known non-viral miRNA genes. As mentioned hereinabove with reference to the background section, although a specific complementary binding site has been demonstrated only for some of the known miRNA genes (primarily Lin-4 and Let-7), all other recently discovered miRNA genes are also believed by those skilled in the art to modulate expression of other genes by complementary binding, although specific complementary binding sites of these other miRNA genes have not yet been found (Ruvkun G., Perspective: Glimpses of a tiny RNA world, Science 294, 779 (2001)).

[2792] It is yet further appreciated that a function of VGAM202 is inhibition of expression of host target genes, as part of a novel viral mechanism of attacking a host. Accordingly, utilities of VGAM202 include diagnosis, prevention and treatment of viral infection by Vaccinia virus. Specific functions, and accordingly utilities, of VGAM202 correlate with, and may be deduced from, the identity of the host target genes which VGAM202 binds and inhibits, and the function of these host target genes, as elaborated hereinbelow.

[2793] Nucleotide sequences of the VGAM202 precursor RNA, herein designated VGAM PRECURSOR RNA, and of the diced VGAM202 RNA, herein designated VGAM RNA, and a schematic representation of the secondary folding of VGAM202 folded precursor RNA, herein designated VGAM FOLDED PRECURSOR RNA, of VGAM202 are further described hereinbelow with reference to Table 1.

[2794] Nucleotide sequences of host target binding sites, such as BINDING SITE-I, BINDING SITE-II and BINDING SITE-III of FIG. 1, found on, and schematic representation of the complementarity of each of these host target binding sites to VGAM202 RNA, herein designated VGAM RNA, are described hereinbelow with reference to Table 2.

[2795] FIG. 1 further provides a conceptual description of another novel bioinformatically detected viral gene of the present invention, referred to here as Viral Genomic Address Messenger 203 (VGAM203) viral gene, which modulates expression of respective host target genes thereof, the function and utility of which host target genes is known in the art.

[2796] VGAM203 is a novel bioinformatically detected regulatory, non protein coding, viral micro RNA (miRNA) gene. The method by which VGAM203 was detected is described hereinabove with reference to FIGS. 2-8.

[2797] VGAM203 gene, herein designated VGAM GENE, is a viral gene contained in the genome of Vaccinia virus. VGAM203 host target gene, herein designated VGAM HOST TARGET GENE, is a human gene contained in the human genome.

[2798] VGAM203 gene, herein designated VGAM GENE, encodes a VGAM203 precursor RNA, herein designated VGAM PRECURSOR RNA. Similar to other miRNA genes, and unlike most ordinary genes, VGAM203 precursor RNA, herein designated VGAM PRECURSOR RNA, does not encode a protein. A nucleotide sequence identical or highly similar to the nucleotide sequence of VGAM203 precursor RNA is designated SEQ ID:189, and is provided hereinbelow with reference to the sequence listing part. Nucleotide sequence SEQ ID:189 is located at position 108588 relative to the genome of Vaccinia virus.

[2799] VGAM203 precursor RNA, herein designated VGAM PRECURSOR RNA, folds onto itself, forming VGAM203 folded precursor RNA, herein designated VGAM FOLDED PRECURSOR RNA, which has a two-dimensional hairpin structure. As is well known in the art, this hairpin structure, is typical of RNA encoded by miRNA genes, and is due to the fact that the nucleotide sequence of the first half of the RNA encoded by a miRNA gene is an accurate or partial inversed-reversed sequence of the nucleotide sequence of the second half thereof.

[2800] An enzyme complex designated DICER COMPLEX, dices the VGAM203 folded precursor RNA, herein designated VGAM FOLDED PRECURSOR RNA, into VGAM203 RNA, herein designated VGAM RNA, a single stranded ˜22 nt long RNA segment. As is known in the art, dicing of a hairpin structured RNA precursor product into a short ˜22 nt RNA segment is catalyzed by an enzyme complex comprising an enzyme called Dicer together with other necessary proteins. A probable (over 76%) nucleotide sequence of VGAM203 RNA is designated SEQ ID:538, and is provided hereinbelow with reference to the sequence listing part.

[2801] VGAM203 host target gene, herein designated VGAM HOST TARGET GENE, encodes a corresponding messenger RNA, VGAM203 host target RNA, herein designated VGAM HOST TARGET RNA. VGAM203 host target RNA, herein designated VGAM HOST TARGET RNA, comprises three regions, as is typical of mRNA of a protein coding gene: a 5 untranslated region, a protein coding region and a 3 untranslated region, designated 5UTR, PROTEIN CODING and 3UTR respectively.

[2802] VGAM203 RNA, herein designated VGAM RNA, binds complementarily to one or more host target binding sites located in untranslated regions of VGAM203 host target RNA, herein designated VGAM HOST TARGET RNA. This complementary binding is due to the fact that the nucleotide sequence of VGAM203 RNA, herein designated VGAM RNA, is an accurate or a partial inversed-reversed sequence of the nucleotide sequence of each of the host target binding sites. As an illustration, FIG. 1 shows 3 such host target binding sites, designated BINDING SITE I, BINDING SITE II and BINDING SITE III respectively. It is appreciated that the number of host target binding sites shown in FIG. 1 is meant as an illustration only, and is not meant to be limiting VGAM203 RNA, herein designated VGAM RNA, may have a different number of host target binding sites in untranslated regions of a VGAM203 host target RNA, herein designated VGAM HOST TARGET RNA. It is further appreciated that while FIG. 1 depicts host target binding sites in the 3UTR region, this is meant as an example only these host target binding sites may be located in the 3UTR region, the 5UTR region, or in both 3UTR and 5UTR regions.

[2803] The complementary binding of VGAM203 RNA, herein designated VGAM RNA, to host target binding sites on VGAM203 host target RNA, herein designated VGAM HOST TARGET RNA, such as BINDING SITE I, BINDING SITE II and BINDING SITE III, inhibits translation of VGAM203 host target RNA, herein designated VGAM HOST TARGET RNA, into VGAM203 host target protein, herein designated VGAM HOST TARGET PROTEIN. VGAM host target protein is therefore outlined by a broken line.

[2804] It is appreciated that VGAM203 host target gene, herein designated VGAM HOST TARGET GENE, in fact represents a plurality of VGAM203 host target genes. The mRNA of each one of this plurality of VGAM203 host target genes comprises one or more host target binding sites, each having a nucleotide sequence which is at least partly complementary to VGAM203 RNA, herein designated VGAM RNA, and which when bound by VGAM203 RNA, herein designated VGAM RNA, causes inhibition of translation of respective one or more VGAM203 host target proteins.

[2805] It is further appreciated by one skilled in the art that the mode of translational inhibition illustrated by FIG. 1 with specific reference to translational inhibition exerted by VGAM203 gene, herein designated VGAM GENE, on one or more VGAM203 host target gene, herein designated VGAM HOST TARGET GENE, is in fact common to other known non-viral miRNA genes. As mentioned hereinabove with reference to the background section, although a specific complementary binding site has been demonstrated only for some of the known miRNA genes (primarily Lin-4 and Let-7), all other recently discovered miRNA genes are also believed by those skilled in the art to modulate expression of other genes by complementary binding, although specific complementary binding sites of these other miRNA genes have not yet been found (Ruvkun G., Perspective: Glimpses of a tiny RNA world, Science 294, 779 (2001)).

[2806] It is yet further appreciated that a function of VGAM203 is inhibition of expression of host target genes, as part of a novel viral mechanism of attacking a host. Accordingly, utilities of VGAM203 include diagnosis, prevention and treatment of viral infection by Vaccinia virus. Specific functions, and accordingly utilities, of VGAM203 correlate with, and may be deduced from, the identity of the host target genes which VGAM203 binds and inhibits, and the function of these host target genes, as elaborated hereinbelow.

[2807] Nucleotide sequences of the VGAM203 precursor RNA, herein designated VGAM PRECURSOR RNA, and of the diced VGAM203 RNA, herein designated VGAM RNA, and a schematic representation of the secondary folding of VGAM203 folded precursor RNA, herein designated VGAM FOLDED PRECURSOR RNA, of VGAM203 are further described hereinbelow with reference to Table 1.

[2808] Nucleotide sequences of host target binding sites, such as BINDING SITE-I, BINDING SITE-II and BINDING SITE-III of FIG. 1, found on, and schematic representation of the complementarity of each of these host target binding sites to VGAM203 RNA, herein designated VGAM RNA, are described hereinbelow with reference to Table 2.

[2809] FIG. 1 further provides a conceptual description of another novel bioinformatically detected viral gene of the present invention, referred to here as Viral Genomic Address Messenger 204 (VGAM204) viral gene, which modulates expression of respective host target genes thereof, the function and utility of which host target genes is known in the art.

[2810] VGAM204 is a novel bioinformatically detected regulatory, non protein coding, viral micro RNA (miRNA) gene. The method by which VGAM204 was detected is described hereinabove with reference to FIGS. 2-8.

[2811] VGAM204 gene, herein designated VGAM GENE, is a viral gene contained in the genome of Vaccinia virus. VGAM204 host target gene, herein designated VGAM HOST TARGET GENE, is a human gene contained in the human genome.

[2812] VGAM204 gene, herein designated VGAM GENE, encodes a VGAM204 precursor RNA, herein designated VGAM PRECURSOR RNA. Similar to other miRNA genes, and unlike most ordinary genes, VGAM204 precursor RNA, herein designated VGAM PRECURSOR RNA, does not encode a protein. A nucleotide sequence identical or highly similar to the nucleotide sequence of VGAM204 precursor RNA is designated SEQ ID:190, and is provided hereinbelow with reference to the sequence listing part. Nucleotide sequence SEQ ID:190 is located at position 108944 relative to the genome of Vaccinia virus.

[2813] VGAM204 precursor RNA, herein designated VGAM PRECURSOR RNA, folds onto itself, forming VGAM204 folded precursor RNA, herein designated VGAM FOLDED PRECURSOR RNA, which has a two-dimensional hairpin structure. As is well known in the art, this hairpin structure, is typical of RNA encoded by miRNA genes, and is due to the fact that the nucleotide sequence of the first half of the RNA encoded by a miRNA gene is an accurate or partial inversed-reversed sequence of the nucleotide sequence of the second half thereof.

[2814] An enzyme complex designated DICER COMPLEX, dices the VGAM204 folded precursor RNA, herein designated VGAM FOLDED PRECURSOR RNA, into VGAM204 RNA, herein designated VGAM RNA, a single stranded ˜22 nt long RNA segment. As is known in the art, dicing of a hairpin structured RNA precursor product into a short ˜22 nt RNA segment is catalyzed by an enzyme complex comprising an enzyme called Dicer together with other necessary proteins. A probable (over 74%) nucleotide sequence of VGAM204 RNA is designated SEQ ID:539, and is provided hereinbelow with reference to the sequence listing part.

[2815] VGAM204 host target gene, herein designated VGAM HOST TARGET GENE, encodes a corresponding messenger RNA, VGAM204 host target RNA, herein designated VGAM HOST TARGET RNA. VGAM204 host target RNA, herein designated VGAM HOST TARGET RNA, comprises three regions, as is typical of mRNA of a protein coding gene: a 5 untranslated region, a protein coding region and a 3 untranslated region, designated 5UTR, PROTEIN CODING and 3UTR respectively.

[2816] VGAM204 RNA, herein designated VGAM RNA, binds complementarily to one or more host target binding sites located in untranslated regions of VGAM204 host target RNA, herein designated VGAM HOST TARGET RNA. This complementary binding is due to the fact that the nucleotide sequence of VGAM204 RNA, herein designated VGAM RNA, is an accurate or a partial inversed-reversed sequence of the nucleotide sequence of each of the host target binding sites. As an illustration, FIG. 1 shows 3 such host target binding sites, designated BINDING SITE I, BINDING SITE II and BINDING SITE III respectively. It is appreciated that the number of host target binding sites shown in FIG. 1 is meant as an illustration only, and is not meant to be limiting VGAM204 RNA, herein designated VGAM RNA, may have a different number of host target binding sites in untranslated regions of a VGAM204 host target RNA, herein designated VGAM HOST TARGET RNA. It is further appreciated that while FIG. 1 depicts host target binding sites in the 3UTR region, this is meant as an example only these host target binding sites may be located in the 3UTR region, the 5UTR region, or in both 3UTR and 5UTR regions.

[2817] The complementary binding of VGAM204 RNA, herein designated VGAM RNA, to host target binding sites on VGAM204 host target RNA, herein designated VGAM HOST TARGET RNA, such as BINDING SITE I, BINDING SITE II and BINDING SITE III, inhibits translation of VGAM204 host target RNA, herein designated VGAM HOST TARGET RNA, into VGAM204 host target protein, herein designated VGAM HOST TARGET PROTEIN. VGAM host target protein is therefore outlined by a broken line.

[2818] It is appreciated that VGAM204 host target gene, herein designated VGAM HOST TARGET GENE, in fact represents a plurality of VGAM204 host target genes. The mRNA of each one of this plurality of VGAM204 host target genes comprises one or more host target binding sites, each having a nucleotide sequence which is at least partly complementary to VGAM204 RNA, herein designated VGAM RNA, and which when bound by VGAM204 RNA, herein designated VGAM RNA, causes inhibition of translation of respective one or more VGAM204 host target proteins.

[2819] It is further appreciated by one skilled in the art that the mode of translational inhibition illustrated by FIG. 1 with specific reference to translational inhibition exerted by VGAM204 gene, herein designated VGAM GENE, on one or more VGAM204 host target gene, herein designated VGAM HOST TARGET GENE, is in fact common to other known non-viral miRNA genes. As mentioned hereinabove with reference to the background section, although a specific complementary binding site has been demonstrated only for some of the known miRNA genes (primarily Lin-4 and Let-7), all other recently discovered miRNA genes are also believed by those skilled in the art to modulate expression of other genes by complementary binding, although specific complementary binding sites of these other miRNA genes have not yet been found (Ruvkun G., Perspective: Glimpses of a tiny RNA world, Science 294, 779 (2001)).

[2820] It is yet further appreciated that a function of VGAM204 is inhibition of expression of host target genes, as part of a novel viral mechanism of attacking a host. Accordingly, utilities of VGAM204 include diagnosis, prevention and treatment of viral infection by Vaccinia virus. Specific functions, and accordingly utilities, of VGAM204 correlate with, and may be deduced from, the identity of the host target genes which VGAM204 binds and inhibits, and the function of these host target genes, as elaborated hereinbelow.

[2821] Nucleotide sequences of the VGAM204 precursor RNA, herein designated VGAM PRECURSOR RNA, and of the diced VGAM204 RNA, herein designated VGAM RNA, and a schematic representation of the secondary folding of VGAM204 folded precursor RNA, herein designated VGAM FOLDED PRECURSOR RNA, of VGAM204 are further described hereinbelow with reference to Table 1.

[2822] Nucleotide sequences of host target binding sites, such as BINDING SITE-I, BINDING SITE-II and BINDING SITE-III of FIG. 1, found on, and schematic representation of the complementarity of each of these host target binding sites to VGAM204 RNA, herein designated VGAM RNA, are described hereinbelow with reference to Table 2.

[2823] FIG. 1 further provides a conceptual description of another novel bioinformatically detected viral gene of the present invention, referred to here as Viral Genomic Address Messenger 205 (VGAM205) viral gene, which modulates expression of respective host target genes thereof, the function and utility of which host target genes is known in the art.

[2824] VGAM205 is a novel bioinformatically detected regulatory, non protein coding, viral micro RNA (miRNA) gene. The method by which VGAM205 was detected is described hereinabove with reference to FIGS. 2-8.

[2825] VGAM205 gene, herein designated VGAM GENE, is a viral gene contained in the genome of Vaccinia virus. VGAM205 host target gene, herein designated VGAM HOST TARGET GENE, is a human gene contained in the human genome.

[2826] VGAM205 gene, herein designated VGAM GENE, encodes a VGAM205 precursor RNA, herein designated VGAM PRECURSOR RNA. Similar to other miRNA genes, and unlike most ordinary genes, VGAM205 precursor RNA, herein designated VGAM PRECURSOR RNA, does not encode a protein. A nucleotide sequence identical or highly similar to the nucleotide sequence of VGAM205 precursor RNA is designated SEQ ID:191, and is provided hereinbelow with reference to the sequence listing part. Nucleotide sequence SEQ ID:191 is located at position 108758 relative to the genome of Vaccinia virus.

[2827] VGAM205 precursor RNA, herein designated VGAM PRECURSOR RNA, folds onto itself, forming VGAM205 folded precursor RNA, herein designated VGAM FOLDED PRECURSOR RNA, which has a two-dimensional hairpin structure. As is well known in the art, this hairpin structure, is typical of RNA encoded by miRNA genes, and is due to the fact that the nucleotide sequence of the first half of the RNA encoded by a miRNA gene is an accurate or partial inversed-reversed sequence of the nucleotide sequence of the second half thereof.

[2828] An enzyme complex designated DICER COMPLEX, dices the VGAM205 folded precursor RNA, herein designated VGAM FOLDED PRECURSOR RNA, into VGAM205 RNA, herein designated VGAM RNA, a single stranded ˜22 nt long RNA segment. As is known in the art, dicing of a hairpin structured RNA precursor product into a short ˜22 nt RNA segment is catalyzed by an enzyme complex comprising an enzyme called Dicer together with other necessary proteins. A probable (over 78%) nucleotide sequence of VGAM205 RNA is designated SEQ ID:540, and is provided hereinbelow with reference to the sequence listing part.

[2829] VGAM205 host target gene, herein designated VGAM HOST TARGET GENE, encodes a corresponding messenger RNA, VGAM205 host target RNA, herein designated VGAM HOST TARGET RNA. VGAM205 host target RNA, herein designated VGAM HOST TARGET RNA, comprises three regions, as is typical of mRNA of a protein coding gene: a 5 untranslated region, a protein coding region and a 3 untranslated region, designated 5UTR, PROTEIN CODING and 3UTR respectively.

[2830] VGAM205 RNA, herein designated VGAM RNA, binds complementarily to one or more host target binding sites located in untranslated regions of VGAM205 host target RNA, herein designated VGAM HOST TARGET RNA. This complementary binding is due to the fact that the nucleotide sequence of VGAM205 RNA, herein designated VGAM RNA, is an accurate or a partial inversed-reversed sequence of the nucleotide sequence of each of the host target binding sites. As an illustration, FIG. 1 shows 3 such host target binding sites, designated BINDING SITE I, BINDING SITE II and BINDING SITE III respectively. It is appreciated that the number of host target binding sites shown in FIG. 1 is meant as an illustration only, and is not meant to be limiting VGAM205 RNA, herein designated VGAM RNA, may have a different number of host target binding sites in untranslated regions of a VGAM205 host target RNA, herein designated VGAM HOST TARGET RNA. It is further appreciated that while FIG. 1 depicts host target binding sites in the 3UTR region, this is meant as an example only these host target binding sites may be located in the 3UTR region, the 5UTR region, or in both 3UTR and 5UTR regions.

[2831] The complementary binding of VGAM205 RNA, herein designated VGAM RNA, to host target binding sites on VGAM205 host target RNA, herein designated VGAM HOST TARGET RNA, such as BINDING SITE I, BINDING SITE II and BINDING SITE III, inhibits translation of VGAM205 host target RNA, herein designated VGAM HOST TARGET RNA, into VGAM205 host target protein, herein designated VGAM HOST TARGET PROTEIN. VGAM host target protein is therefore outlined by a broken line.

[2832] It is appreciated that VGAM205 host target gene, herein designated VGAM HOST TARGET GENE, in fact represents a plurality of VGAM205 host target genes. The mRNA of each one of this plurality of VGAM205 host target genes comprises one or more host target binding sites, each having a nucleotide sequence which is at least partly complementary to VGAM205 RNA, herein designated VGAM RNA, and which when bound by VGAM205 RNA, herein designated VGAM RNA, causes inhibition of translation of respective one or more VGAM205 host target proteins.

[2833] It is further appreciated by one skilled in the art that the mode of translational inhibition illustrated by FIG. 1 with specific reference to translational inhibition exerted by VGAM205 gene, herein designated VGAM GENE, on one or more VGAM205 host target gene, herein designated VGAM HOST TARGET GENE, is in fact common to other known non-viral miRNA genes. As mentioned hereinabove with reference to the background section, although a specific complementary binding site has been demonstrated only for some of the known miRNA genes (primarily Lin-4 and Let-7), all other recently discovered miRNA genes are also believed by those skilled in the art to modulate expression of other genes by complementary binding, although specific complementary binding sites of these other miRNA genes have not yet been found (Ruvkun G., Perspective: Glimpses of a tiny RNA world, Science 294, 779 (2001)).

[2834] It is yet further appreciated that a function of VGAM205 is inhibition of expression of host target genes, as part of a novel viral mechanism of attacking a host. Accordingly, utilities of VGAM205 include diagnosis, prevention and treatment of viral infection by Vaccinia virus. Specific functions, and accordingly utilities, of VGAM205 correlate with, and may be deduced from, the identity of the host target genes which VGAM205 binds and inhibits, and the function of these host target genes, as elaborated hereinbelow.

[2835] Nucleotide sequences of the VGAM205 precursor RNA, herein designated VGAM PRECURSOR RNA, and of the diced VGAM205 RNA, herein designated VGAM RNA, and a schematic representation of the secondary folding of VGAM205 folded precursor RNA, herein designated VGAM FOLDED PRECURSOR RNA, of VGAM205 are further described hereinbelow with reference to Table 1.

[2836] Nucleotide sequences of host target binding sites, such as BINDING SITE-I, BINDING SITE-II and BINDING SITE-III of FIG. 1, found on, and schematic representation of the complementarity of each of these host target binding sites to VGAM205 RNA, herein designated VGAM RNA, are described hereinbelow with reference to Table 2.

[2837] FIG. 1 further provides a conceptual description of another novel bioinformatically detected viral gene of the present invention, referred to here as Viral Genomic Address Messenger 206 (VGAM206) viral gene, which modulates expression of respective host target genes thereof, the function and utility of which host target genes is known in the art.

[2838] VGAM206 is a novel bioinformatically detected regulatory, non protein coding, viral micro RNA (miRNA) gene. The method by which VGAM206 was detected is described hereinabove with reference to FIGS. 2-8.

[2839] VGAM206 gene, herein designated VGAM GENE, is a viral gene contained in the genome of Vaccinia virus. VGAM206 host target gene, herein designated VGAM HOST TARGET GENE, is a human gene contained in the human genome.

[2840] VGAM206 gene, herein designated VGAM GENE, encodes a VGAM206 precursor RNA, herein designated VGAM PRECURSOR RNA. Similar to other miRNA genes, and unlike most ordinary genes, VGAM206 precursor RNA, herein designated VGAM PRECURSOR RNA, does not encode a protein. A nucleotide sequence identical or highly similar to the nucleotide sequence of VGAM206 precursor RNA is designated SEQ ID:192, and is provided hereinbelow with reference to the sequence listing part. Nucleotide sequence SEQ ID:192 is located at position 109361 relative to the genome of Vaccinia virus.

[2841] VGAM206 precursor RNA, herein designated VGAM PRECURSOR RNA, folds onto itself, forming VGAM206 folded precursor RNA, herein designated VGAM FOLDED PRECURSOR RNA, which has a two-dimensional hairpin structure. As is well known in the art, this hairpin structure, is typical of RNA encoded by miRNA genes, and is due to the fact that the nucleotide sequence of the first half of the RNA encoded by a miRNA gene is an accurate or partial inversed-reversed sequence of the nucleotide sequence of the second half thereof.

[2842] An enzyme complex designated DICER COMPLEX, dices the VGAM206 folded precursor RNA, herein designated VGAM FOLDED PRECURSOR RNA, into VGAM206 RNA, herein designated VGAM RNA, a single stranded ˜22 nt long RNA segment. As is known in the art, dicing of a hairpin structured RNA precursor product into a short ˜22 nt RNA segment is catalyzed by an enzyme complex comprising an enzyme called Dicer together with other necessary proteins. A probable (over 78%) nucleotide sequence of VGAM206 RNA is designated SEQ ID:541, and is provided hereinbelow with reference to the sequence listing part.

[2843] VGAM206 host target gene, herein designated VGAM HOST TARGET GENE, encodes a corresponding messenger RNA, VGAM206 host target RNA, herein designated VGAM HOST TARGET RNA. VGAM206 host target RNA, herein designated VGAM HOST TARGET RNA, comprises three regions, as is typical of mRNA of a protein coding gene: a 5 untranslated region, a protein coding region and a 3 untranslated region, designated 5UTR, PROTEIN CODING and 3UTR respectively.

[2844] VGAM206 RNA, herein designated VGAM RNA, binds complementarily to one or more host target binding sites located in untranslated regions of VGAM206 host target RNA, herein designated VGAM HOST TARGET RNA. This complementary binding is due to the fact that the nucleotide sequence of VGAM206 RNA, herein designated VGAM RNA, is an accurate or a partial inversed-reversed sequence of the nucleotide sequence of each of the host target binding sites. As an illustration, FIG. 1 shows 3 such host target binding sites, designated BINDING SITE I, BINDING SITE II and BINDING SITE III respectively. It is appreciated that the number of host target binding sites shown in FIG. 1 is meant as an illustration only, and is not meant to be limiting VGAM206 RNA, herein designated VGAM RNA, may have a different number of host target binding sites in untranslated regions of a VGAM206 host target RNA, herein designated VGAM HOST TARGET RNA. It is further appreciated that while FIG. 1 depicts host target binding sites in the 3UTR region, this is meant as an example only these host target binding sites may be located in the 3UTR region, the 5UTR region, or in both 3UTR and 5UTR regions.

[2845] The complementary binding of VGAM206 RNA, herein designated VGAM RNA, to host target binding sites on VGAM206 host target RNA, herein designated VGAM HOST TARGET RNA, such as BINDING SITE I, BINDING SITE II and BINDING SITE III, inhibits translation of VGAM206 host target RNA, herein designated VGAM HOST TARGET RNA, into VGAM206 host target protein, herein designated VGAM HOST TARGET PROTEIN. VGAM host target protein is therefore outlined by a broken line.

[2846] It is appreciated that VGAM206 host target gene, herein designated VGAM HOST TARGET GENE, in fact represents a plurality of VGAM206 host target genes. The mRNA of each one of this plurality of VGAM206 host target genes comprises one or more host target binding sites, each having a nucleotide sequence which is at least partly complementary to VGAM206 RNA, herein designated VGAM RNA, and which when bound by VGAM206 RNA, herein designated VGAM RNA, causes inhibition of translation of respective one or more VGAM206 host target proteins.

[2847] It is further appreciated by one skilled in the art that the mode of translational inhibition illustrated by FIG. 1 with specific reference to translational inhibition exerted by VGAM206 gene, herein designated VGAM GENE, on one or more VGAM206 host target gene, herein designated VGAM HOST TARGET GENE, is in fact common to other known non-viral miRNA genes. As mentioned hereinabove with reference to the background section, although a specific complementary binding site has been demonstrated only for some of the known miRNA genes (primarily Lin-4 and Let-7), all other recently discovered miRNA genes are also believed by those skilled in the art to modulate expression of other genes by complementary binding, although specific complementary binding sites of these other miRNA genes have not yet been found (Ruvkun G., Perspective: Glimpses of a tiny RNA world, Science 294, 779 (2001)).

[2848] It is yet further appreciated that a function of VGAM206 is inhibition of expression of host target genes, as part of a novel viral mechanism of attacking a host. Accordingly, utilities of VGAM206 include diagnosis, prevention and treatment of viral infection by Vaccinia virus. Specific functions, and accordingly utilities, of VGAM206 correlate with, and may be deduced from, the identity of the host target genes which VGAM206 binds and inhibits, and the function of these host target genes, as elaborated hereinbelow.

[2849] Nucleotide sequences of the VGAM206 precursor RNA, herein designated VGAM PRECURSOR RNA, and of the diced VGAM206 RNA, herein designated VGAM RNA, and a schematic representation of the secondary folding of VGAM206 folded precursor RNA, herein designated VGAM FOLDED PRECURSOR RNA, of VGAM206 are further described hereinbelow with reference to Table 1.

[2850] Nucleotide sequences of host target binding sites, such as BINDING SITE-I, BINDING SITE-II and BINDING SITE-III of FIG. 1, found on, and schematic representation of the complementarity of each of these host target binding sites to VGAM206 RNA, herein designated VGAM RNA, are described hereinbelow with reference to Table 2.

[2851] FIG. 1 further provides a conceptual description of another novel bioinformatically detected viral gene of the present invention, referred to here as Viral Genomic Address Messenger 207 (VGAM207) viral gene, which modulates expression of respective host target genes thereof, the function and utility of which host target genes is known in the art.

[2852] VGAM207 is a novel bioinformatically detected regulatory, non protein coding, viral micro RNA (miRNA) gene. The method by which VGAM207 was detected is described hereinabove with reference to FIGS. 2-8.

[2853] VGAM207 gene, herein designated VGAM GENE, is a viral gene contained in the genome of Vaccinia virus. VGAM207 host target gene, herein designated VGAM HOST TARGET GENE, is a human gene contained in the human genome.

[2854] VGAM207 gene, herein designated VGAM GENE, encodes a VGAM207 precursor RNA, herein designated VGAM PRECURSOR RNA. Similar to other miRNA genes, and unlike most ordinary genes, VGAM207 precursor RNA, herein designated VGAM PRECURSOR RNA, does not encode a protein. A nucleotide sequence identical or highly similar to the nucleotide sequence of VGAM207 precursor RNA is designated SEQ ID:193, and is provided hereinbelow with reference to the sequence listing part. Nucleotide sequence SEQ ID:193 is located at position 109549 relative to the genome of Vaccinia virus.

[2855] VGAM207 precursor RNA, herein designated VGAM PRECURSOR RNA, folds onto itself, forming VGAM207 folded precursor RNA, herein designated VGAM FOLDED PRECURSOR RNA, which has a two-dimensional hairpin structure. As is well known in the art, this hairpin structure, is typical of RNA encoded by miRNA genes, and is due to the fact that the nucleotide sequence of the first half of the RNA encoded by a miRNA gene is an accurate or partial inversed-reversed sequence of the nucleotide sequence of the second half thereof.

[2856] An enzyme complex designated DICER COMPLEX, dices the VGAM207 folded precursor RNA, herein designated VGAM FOLDED PRECURSOR RNA, into VGAM207 RNA, herein designated VGAM RNA, a single stranded ˜22 nt long RNA segment. As is known in the art, dicing of a hairpin structured RNA precursor product into a short ˜22 nt RNA segment is catalyzed by an enzyme complex comprising an enzyme called Dicer together with other necessary proteins. A probable (over 80%) nucleotide sequence of VGAM207 RNA is designated SEQ ID:542, and is provided hereinbelow with reference to the sequence listing part.

[2857] VGAM207 host target gene, herein designated VGAM HOST TARGET GENE, encodes a corresponding messenger RNA, VGAM207 host target RNA, herein designated VGAM HOST TARGET RNA. VGAM207 host target RNA, herein designated VGAM HOST TARGET RNA, comprises three regions, as is typical of mRNA of a protein coding gene: a 5 untranslated region, a protein coding region and a 3 untranslated region, designated 5UTR, PROTEIN CODING and 3UTR respectively.

[2858] VGAM207 RNA, herein designated VGAM RNA, binds complementarily to one or more host target binding sites located in untranslated regions of VGAM207 host target RNA, herein designated VGAM HOST TARGET RNA. This complementary binding is due to the fact that the nucleotide sequence of VGAM207 RNA, herein designated VGAM RNA, is an accurate or a partial inversed-reversed sequence of the nucleotide sequence of each of the host target binding sites. As an illustration, FIG. 1 shows 3 such host target binding sites, designated BINDING SITE I, BINDING SITE II and BINDING SITE III respectively. It is appreciated that the number of host target binding sites shown in FIG. 1 is meant as an illustration only, and is not meant to be limiting VGAM207 RNA, herein designated VGAM RNA, may have a different number of host target binding sites in untranslated regions of a VGAM207 host target RNA, herein designated VGAM HOST TARGET RNA. It is further appreciated that while FIG. 1 depicts host target binding sites in the 3UTR region, this is meant as an example only these host target binding sites may be located in the 3UTR region, the 5UTR region, or in both 3UTR and 5UTR regions.

[2859] The complementary binding of VGAM207 RNA, herein designated VGAM RNA, to host target binding sites on VGAM207 host target RNA, herein designated VGAM HOST TARGET RNA, such as BINDING SITE I, BINDING SITE II and BINDING SITE III, inhibits translation of VGAM207 host target RNA, herein designated VGAM HOST TARGET RNA, into VGAM207 host target protein, herein designated VGAM HOST TARGET PROTEIN. VGAM host target protein is therefore outlined by a broken line.

[2860] It is appreciated that VGAM207 host target gene, herein designated VGAM HOST TARGET GENE, in fact represents a plurality of VGAM207 host target genes. The mRNA of each one of this plurality of VGAM207 host target genes comprises one or more host target binding sites, each having a nucleotide sequence which is at least partly complementary to VGAM207 RNA, herein designated VGAM RNA, and which when bound by VGAM207 RNA, herein designated VGAM RNA, causes inhibition of translation of respective one or more VGAM207 host target proteins.

[2861] It is further appreciated by one skilled in the art that the mode of translational inhibition illustrated by FIG. 1 with specific reference to translational inhibition exerted by VGAM207 gene, herein designated VGAM GENE, on one or more VGAM207 host target gene, herein designated VGAM HOST TARGET GENE, is in fact common to other known non-viral miRNA genes. As mentioned hereinabove with reference to the background section, although a specific complementary binding site has been demonstrated only for some of the known miRNA genes (primarily Lin-4 and Let-7), all other recently discovered miRNA genes are also believed by those skilled in the art to modulate expression of other genes by complementary binding, although specific complementary binding sites of these other miRNA genes have not yet been found (Ruvkun G., Perspective: Glimpses of a tiny RNA world, Science 294, 779 (2001)).

[2862] It is yet further appreciated that a function of VGAM207 is inhibition of expression of host target genes, as part of a novel viral mechanism of attacking a host. Accordingly, utilities of VGAM207 include diagnosis, prevention and treatment of viral infection by Vaccinia virus. Specific functions, and accordingly utilities, of VGAM207 correlate with, and may be deduced from, the identity of the host target genes which VGAM207 binds and inhibits, and the function of these host target genes, as elaborated hereinbelow.

[2863] Nucleotide sequences of the VGAM207 precursor RNA, herein designated VGAM PRECURSOR RNA, and of the diced VGAM207 RNA, herein designated VGAM RNA, and a schematic representation of the secondary folding of VGAM207 folded precursor RNA, herein designated VGAM FOLDED PRECURSOR RNA, of VGAM207 are further described hereinbelow with reference to Table 1.

[2864] Nucleotide sequences of host target binding sites, such as BINDING SITE-I, BINDING SITE-II and BINDING SITE-III of FIG. 1, found on, and schematic representation of the complementarity of each of these host target binding sites to VGAM207 RNA, herein designated VGAM RNA, are described hereinbelow with reference to Table 2.

[2865] FIG. 1 further provides a conceptual description of another novel bioinformatically detected viral gene of the present invention, referred to here as Viral Genomic Address Messenger 208 (VGAM208) viral gene, which modulates expression of respective host target genes thereof, the function and utility of which host target genes is known in the art.

[2866] VGAM208 is a novel bioinformatically detected regulatory, non protein coding, viral micro RNA (miRNA) gene. The method by which VGAM208 was detected is described hereinabove with reference to FIGS. 2-8.

[2867] VGAM208 gene, herein designated VGAM GENE, is a viral gene contained in the genome of Vaccinia virus. VGAM208 host target gene, herein designated VGAM HOST TARGET GENE, is a human gene contained in the human genome.

[2868] VGAM208 gene, herein designated VGAM GENE, encodes a VGAM208 precursor RNA, herein designated VGAM PRECURSOR RNA. Similar to other miRNA genes, and unlike most ordinary genes, VGAM208 precursor RNA, herein designated VGAM PRECURSOR RNA, does not encode a protein. A nucleotide sequence identical or highly similar to the nucleotide sequence of VGAM208 precursor RNA is designated SEQ ID:194, and is provided hereinbelow with reference to the sequence listing part. Nucleotide sequence SEQ ID:194 is located at position 109656 relative to the genome of Vaccinia virus.

[2869] VGAM208 precursor RNA, herein designated VGAM PRECURSOR RNA, folds onto itself, forming VGAM208 folded precursor RNA, herein designated VGAM FOLDED PRECURSOR RNA, which has a two-dimensional hairpin structure. As is well known in the art, this hairpin structure, is typical of RNA encoded by miRNA genes, and is due to the fact that the nucleotide sequence of the first half of the RNA encoded by a miRNA gene is an accurate or partial inversed-reversed sequence of the nucleotide sequence of the second half thereof.

[2870] An enzyme complex designated DICER COMPLEX, dices the VGAM208 folded precursor RNA, herein designated VGAM FOLDED PRECURSOR RNA, into VGAM208 RNA, herein designated VGAM RNA, a single stranded ˜22 nt long RNA segment. As is known in the art, dicing of a hairpin structured RNA precursor product into a short ˜22 nt RNA segment is catalyzed by an enzyme complex comprising an enzyme called Dicer together with other necessary proteins. A probable (over 85%) nucleotide sequence of VGAM208 RNA is designated SEQ ID:543, and is provided hereinbelow with reference to the sequence listing part.

[2871] VGAM208 host target gene, herein designated VGAM HOST TARGET GENE, encodes a corresponding messenger RNA, VGAM208 host target RNA, herein designated VGAM HOST TARGET RNA. VGAM208 host target RNA, herein designated VGAM HOST TARGET RNA, comprises three regions, as is typical of mRNA of a protein coding gene: a 5 untranslated region, a protein coding region and a 3 untranslated region, designated 5UTR, PROTEIN CODING and 3UTR respectively.

[2872] VGAM208 RNA, herein designated VGAM RNA, binds complementarily to one or more host target binding sites located in untranslated regions of VGAM208 host target RNA, herein designated VGAM HOST TARGET RNA. This complementary binding is due to the fact that the nucleotide sequence of VGAM208 RNA, herein designated VGAM RNA, is an accurate or a partial inversed-reversed sequence of the nucleotide sequence of each of the host target binding sites. As an illustration, FIG. 1 shows 3 such host target binding sites, designated BINDING SITE I, BINDING SITE II and BINDING SITE III respectively. It is appreciated that the number of host target binding sites shown in FIG. 1 is meant as an illustration only, and is not meant to be limiting VGAM208 RNA, herein designated VGAM RNA, may have a different number of host target binding sites in untranslated regions of a VGAM208 host target RNA, herein designated VGAM HOST TARGET RNA. It is further appreciated that while FIG. 1 depicts host target binding sites in the 3UTR region, this is meant as an example only these host target binding sites may be located in the 3UTR region, the 5UTR region, or in both 3UTR and 5UTR regions.

[2873] The complementary binding of VGAM208 RNA, herein designated VGAM RNA, to host target binding sites on VGAM208 host target RNA, herein designated VGAM HOST TARGET RNA, such as BINDING SITE I, BINDING SITE II and BINDING SITE III, inhibits translation of VGAM208 host target RNA, herein designated VGAM HOST TARGET RNA, into VGAM208 host target protein, herein designated VGAM HOST TARGET PROTEIN. VGAM host target protein is therefore outlined by a broken line.

[2874] It is appreciated that VGAM208 host target gene, herein designated VGAM HOST TARGET GENE, in fact represents a plurality of VGAM208 host target genes. The mRNA of each one of this plurality of VGAM208 host target genes comprises one or more host target binding sites, each having a nucleotide sequence which is at least partly complementary to VGAM208 RNA, herein designated VGAM RNA, and which when bound by VGAM208 RNA, herein designated VGAM RNA, causes inhibition of translation of respective one or more VGAM208 host target proteins.

[2875] It is further appreciated by one skilled in the art that the mode of translational inhibition illustrated by FIG. 1 with specific reference to translational inhibition exerted by VGAM208 gene, herein designated VGAM GENE, on one or more VGAM208 host target gene, herein designated VGAM HOST TARGET GENE, is in fact common to other known non-viral miRNA genes. As mentioned hereinabove with reference to the background section, although a specific complementary binding site has been demonstrated only for some of the known miRNA genes (primarily Lin-4 and Let-7), all other recently discovered miRNA genes are also believed by those skilled in the art to modulate expression of other genes by complementary binding, although specific complementary binding sites of these other miRNA genes have not yet been found (Ruvkun G., Perspective: Glimpses of a tiny RNA world, Science 294, 779 (2001)).

[2876] It is yet further appreciated that a function of VGAM208 is inhibition of expression of host target genes, as part of a novel viral mechanism of attacking a host. Accordingly, utilities of VGAM208 include diagnosis, prevention and treatment of viral infection by Vaccinia virus. Specific functions, and accordingly utilities, of VGAM208 correlate with, and may be deduced from, the identity of the host target genes which VGAM208 binds and inhibits, and the function of these host target genes, as elaborated hereinbelow.

[2877] Nucleotide sequences of the VGAM208 precursor RNA, herein designated VGAM PRECURSOR RNA, and of the diced VGAM208 RNA, herein designated VGAM RNA, and a schematic representation of the secondary folding of VGAM208 folded precursor RNA, herein designated VGAM FOLDED PRECURSOR RNA, of VGAM208 are further described hereinbelow with reference to Table 1.

[2878] Nucleotide sequences of host target binding sites, such as BINDING SITE-I, BINDING SITE-II and BINDING SITE-III of FIG. 1, found on, and schematic representation of the complementarity of each of these host target binding sites to VGAM208 RNA, herein designated VGAM RNA, are described hereinbelow with reference to Table 2.

[2879] FIG. 1 further provides a conceptual description of another novel bioinformatically detected viral gene of the present invention, referred to here as Viral Genomic Address Messenger 209 (VGAM209) viral gene, which modulates expression of respective host target genes thereof, the function and utility of which host target genes is known in the art.

[2880] VGAM209 is a novel bioinformatically detected regulatory, non protein coding, viral micro RNA (miRNA) gene. The method by which VGAM209 was detected is described hereinabove with reference to FIGS. 2-8.

[2881] VGAM209 gene, herein designated VGAM GENE, is a viral gene contained in the genome of Vaccinia virus. VGAM209 host target gene, herein designated VGAM HOST TARGET GENE, is a human gene contained in the human genome.

[2882] VGAM209 gene, herein designated VGAM GENE, encodes a VGAM209 precursor RNA, herein designated VGAM PRECURSOR RNA. Similar to other miRNA genes, and unlike most ordinary genes, VGAM209 precursor RNA, herein designated VGAM PRECURSOR RNA, does not encode a protein. A nucleotide sequence identical or highly similar to the nucleotide sequence of VGAM209 precursor RNA is designated SEQ ID:195, and is provided hereinbelow with reference to the sequence listing part. Nucleotide sequence SEQ ID:195 is located at position 109286 relative to the genome of Vaccinia virus.

[2883] VGAM209 precursor RNA, herein designated VGAM PRECURSOR RNA, folds onto itself, forming VGAM209 folded precursor RNA, herein designated VGAM FOLDED PRECURSOR RNA, which has a two-dimensional hairpin structure. As is well known in the art, this hairpin structure, is typical of RNA encoded by miRNA genes, and is due to the fact that the nucleotide sequence of the first half of the RNA encoded by a miRNA gene is an accurate or partial inversed-reversed sequence of the nucleotide sequence of the second half thereof.

[2884] An enzyme complex designated DICER COMPLEX, dices the VGAM209 folded precursor RNA, herein designated VGAM FOLDED PRECURSOR RNA, into VGAM209 RNA, herein designated VGAM RNA, a single stranded ˜22 nt long RNA segment. As is known in the art, dicing of a hairpin structured RNA precursor product into a short ˜22 nt RNA segment is catalyzed by an enzyme complex comprising an enzyme called Dicer together with other necessary proteins. A probable (over 25%) nucleotide sequence of VGAM209 RNA is designated SEQ ID:544, and is provided hereinbelow with reference to the sequence listing part.

[2885] VGAM209 host target gene, herein designated VGAM HOST TARGET GENE, encodes a corresponding messenger RNA, VGAM209 host target RNA, herein designated VGAM HOST TARGET RNA. VGAM209 host target RNA, herein designated VGAM HOST TARGET RNA, comprises three regions, as is typical of mRNA of a protein coding gene: a 5 untranslated region, a protein coding region and a 3 untranslated region, designated 5UTR, PROTEIN CODING and 3UTR respectively.

[2886] VGAM209 RNA, herein designated VGAM RNA, binds complementarily to one or more host target binding sites located in untranslated regions of VGAM209 host target RNA, herein designated VGAM HOST TARGET RNA. This complementary binding is due to the fact that the nucleotide sequence of VGAM209 RNA, herein designated VGAM RNA, is an accurate or a partial inversed-reversed sequence of the nucleotide sequence of each of the host target binding sites. As an illustration, FIG. 1 shows 3 such host target binding sites, designated BINDING SITE I, BINDING SITE II and BINDING SITE III respectively. It is appreciated that the number of host target binding sites shown in FIG. 1 is meant as an illustration only, and is not meant to be limiting VGAM209 RNA, herein designated VGAM RNA, may have a different number of host target binding sites in untranslated regions of a VGAM209 host target RNA, herein designated VGAM HOST TARGET RNA. It is further appreciated that while FIG. 1 depicts host target binding sites in the 3UTR region, this is meant as an example only these host target binding sites may be located in the 3UTR region, the 5UTR region, or in both 3UTR and 5UTR regions.

[2887] The complementary binding of VGAM209 RNA, herein designated VGAM RNA, to host target binding sites on VGAM209 host target RNA, herein designated VGAM HOST TARGET RNA, such as BINDING SITE I, BINDING SITE II and BINDING SITE III, inhibits translation of VGAM209 host target RNA, herein designated VGAM HOST TARGET RNA, into VGAM209 host target protein, herein designated VGAM HOST TARGET PROTEIN. VGAM host target protein is therefore outlined by a broken line.

[2888] it is appreciated that VGAM209 host target gene, herein designated VGAM HOST TARGET GENE, in fact represents a plurality of VGAM209 host target genes. The mRNA of each one of this plurality of VGAM209 host target genes comprises one or more host target binding sites, each having a nucleotide sequence which is at least partly complementary to VGAM209 RNA, herein designated VGAM RNA, and which when bound by VGAM209 RNA, herein designated VGAM RNA, causes inhibition of translation of respective one or more VGAM209 host target proteins.

[2889] It is further appreciated by one skilled in the art that the mode of translational inhibition illustrated by FIG. 1 with specific reference to translational inhibition exerted by VGAM209 gene, herein designated VGAM GENE, on one or more VGAM209 host target gene, herein designated VGAM HOST TARGET GENE, is in fact common to other known non-viral miRNA genes. As mentioned hereinabove with reference to the background section, although a specific complementary binding site has been demonstrated only for some of the known miRNA genes (primarily Lin-4 and Let-7), all other recently discovered miRNA genes are also believed by those skilled in the art to modulate expression of other genes by complementary binding, although specific complementary binding sites of these other miRNA genes have not yet been found (Ruvkun G., Perspective: Glimpses of a tiny RNA world, Science 294, 779 (2001)).

[2890] It is yet further appreciated that a function of VGAM209 is inhibition of expression of host target genes, as part of a novel viral mechanism of attacking a host. Accordingly, utilities of VGAM209 include diagnosis, prevention and treatment of viral infection by Vaccinia virus. Specific functions, and accordingly utilities, of VGAM209 correlate with, and may be deduced from, the identity of the host target genes which VGAM209 binds and inhibits, and the function of these host target genes, as elaborated hereinbelow.

[2891] Nucleotide sequences of the VGAM209 precursor RNA, herein designated VGAM PRECURSOR RNA, and of the diced VGAM209 RNA, herein designated VGAM RNA, and a schematic representation of the secondary folding of VGAM209 folded precursor RNA, herein designated VGAM FOLDED PRECURSOR RNA, of VGAM209 are further described hereinbelow with reference to Table 1.

[2892] Nucleotide sequences of host target binding sites, such as BINDING SITE-I, BINDING SITE-II and BINDING SITE-III of FIG. 1, found on, and schematic representation of the complementarity of each of these host target binding sites to VGAM209 RNA, herein designated VGAM RNA, are described hereinbelow with reference to Table 2.

[2893] FIG. 1 further provides a conceptual description of another novel bioinformatically detected viral gene of the present invention, referred to here as Viral Genomic Address Messenger 210 (VGAM210) viral gene, which modulates expression of respective host target genes thereof, the function and utility of which host target genes is known in the art.

[2894] VGAM210 is a novel bioinformatically detected regulatory, non protein coding, viral micro RNA (miRNA) gene. The method by which VGAM210 was detected is described hereinabove with reference to FIGS. 2-8.

[2895] VGAM2110 gene, herein designated VGAM GENE, is a viral gene contained in the genome of Vaccinia virus. VGAM210 host target gene, herein designated VGAM HOST TARGET GENE, is a human gene contained in the human genome.

[2896] VGAM210 gene, herein designated VGAM GENE, encodes a VGAM210 precursor RNA, herein designated VGAM PRECURSOR RNA. Similar to other miRNA genes, and unlike most ordinary genes, VGAM210 precursor RNA, herein designated VGAM PRECURSOR RNA, does not encode a protein. A nucleotide sequence identical or highly similar to the nucleotide sequence of VGAM210 precursor RNA is designated SEQ ID:196, and is provided hereinbelow with reference to the sequence listing part. Nucleotide sequence SEQ ID:196 is located at position 110952 relative to the genome of Vaccinia virus.

[2897] VGAM210 precursor RNA, herein designated VGAM PRECURSOR RNA, folds onto itself, forming VGAM210 folded precursor RNA, herein designated VGAM FOLDED PRECURSOR RNA, which has a two-dimensional hairpin structure. As is well known in the art, this hairpin structure, is typical of RNA encoded by miRNA genes, and is due to the fact that the nucleotide sequence of the first half of the RNA encoded by a miRNA gene is an accurate or partial inversed-reversed sequence of the nucleotide sequence of the second half thereof.

[2898] An enzyme complex designated DICER COMPLEX, dices the VGAM210 folded precursor RNA, herein designated VGAM FOLDED PRECURSOR RNA, into VGAM210 RNA, herein designated VGAM RNA, a single stranded ˜22 nt long RNA segment. As is known in the art, dicing of a hairpin structured RNA precursor product into a short ˜22 nt RNA segment is catalyzed by an enzyme complex comprising an enzyme called Dicer together with other necessary proteins. A probable (over 91%) nucleotide sequence of VGAM210 RNA is designated SEQ ID:545, and is provided hereinbelow with reference to the sequence listing part.

[2899] VGAM210 host target gene, herein designated VGAM HOST TARGET GENE, encodes a corresponding messenger RNA, VGAM210 host target RNA, herein designated VGAM HOST TARGET RNA. VGAM210 host target RNA, herein designated VGAM HOST TARGET RNA, comprises three regions, as is typical of mRNA of a protein coding gene: a 5 untranslated region, a protein coding region and a 3 untranslated region, designated 5UTR, PROTEIN CODING and 3UTR respectively.

[2900] VGAM210 RNA, herein designated VGAM RNA, binds complementarily to one or more host target binding sites located in untranslated regions of VGAM210 host target RNA, herein designated VGAM HOST TARGET RNA. This complementary binding is due to the fact that the nucleotide sequence of VGAM210 RNA, herein designated VGAM RNA, is an accurate or a partial inversed-reversed sequence of the nucleotide sequence of each of the host target binding sites. As an illustration, FIG. 1 shows 3 such host target binding sites, designated BINDING SITE I, BINDING SITE II and BINDING SITE III respectively. It is appreciated that the number of host target binding sites shown in FIG. 1 is meant as an illustration only, and is not meant to be limiting VGAM210 RNA, herein designated VGAM RNA, may have a different number of host target binding sites in untranslated regions of a VGAM210 host target RNA, herein designated VGAM HOST TARGET RNA. It is further appreciated that while FIG. 1 depicts host target binding sites in the 3UTR region, this is meant as an example only these host target binding sites may be located in the 3UTR region, the 5UTR region, or in both 3UTR and 5UTR regions.

[2901] The complementary binding of VGAM210 RNA, herein designated VGAM RNA, to host target binding sites on VGAM210 host target RNA, herein designated VGAM HOST TARGET RNA, such as BINDING SITE I, BINDING SITE II and BINDING SITE III, inhibits translation of VGAM210 host target RNA, herein designated VGAM HOST TARGET RNA, into VGAM210 host target protein, herein designated VGAM HOST TARGET PROTEIN. VGAM host target protein is therefore outlined by a broken line.

[2902] It is appreciated that VGAM210 host target gene, herein designated VGAM HOST TARGET GENE, in fact represents a plurality of VGAM210 host target genes. The mRNA of each one of this plurality of VGAM210 host target genes comprises one or more host target binding sites, each having a nucleotide sequence which is at least partly complementary to VGAM210 RNA, herein designated VGAM RNA, and which when bound by VGAM210 RNA, herein designated VGAM RNA, causes inhibition of translation of respective one or more VGAM210 host target proteins.

[2903] It is further appreciated by one skilled in the art that the mode of translational inhibition illustrated by FIG. 1 with specific reference to translational inhibition exerted by VGAM210 gene, herein designated VGAM GENE, on one or more VGAM210 host target gene, herein designated VGAM HOST TARGET GENE, is in fact common to other known non-viral miRNA genes. As mentioned hereinabove with reference to the background section, although a specific complementary binding site has been demonstrated only for some of the known miRNA genes (primarily Lin-4 and Let-7), all other recently discovered miRNA genes are also believed by those skilled in the art to modulate expression of other genes by complementary binding, although specific complementary binding sites of these other miRNA genes have not yet been found (Ruvkun G., Perspective: Glimpses of a tiny RNA world, Science 294, 779 (2001)).

[2904] It is yet further appreciated that a function of VGAM210 is inhibition of expression of host target genes, as part of a novel viral mechanism of attacking a host. Accordingly, utilities of VGAM210 include diagnosis, prevention and treatment of viral infection by Vaccinia virus. Specific functions, and accordingly utilities, of VGAM210 correlate with, and may be deduced from, the identity of the host target genes which VGAM210 binds and inhibits, and the function of these host target genes, as elaborated hereinbelow.

[2905] Nucleotide sequences of the VGAM210 precursor RNA, herein designated VGAM PRECURSOR RNA, and of the diced VGAM210 RNA, herein designated VGAM RNA, and a schematic representation of the secondary folding of VGAM210 folded precursor RNA, herein designated VGAM FOLDED PRECURSOR RNA, of VGAM210 are further described hereinbelow with reference to Table 1.

[2906] Nucleotide sequences of host target binding sites, such as BINDING SITE-I, BINDING SITE-II and BINDING SITE-III of FIG. 1, found on, and schematic representation of the complementarity of each of these host target binding sites to VGAM210 RNA, herein designated VGAM RNA, are described hereinbelow with reference to Table 2.

[2907] FIG. 1 further provides a conceptual description of another novel bioinformatically detected viral gene of the present invention, referred to here as Viral Genomic Address Messenger 211 (VGAM211) viral gene, which modulates expression of respective host target genes thereof, the function and utility of which host target genes is known in the art.

[2908] VGAM211 is a novel bioinformatically detected regulatory, non protein coding, viral micro RNA (miRNA) gene. The method by which VGAM211 was detected is described hereinabove with reference to FIGS. 2-8.

[2909] VGAM211 gene, herein designated VGAM GENE, is a viral gene contained in the genome of Vaccinia virus. VGAM211 host target gene, herein designated VGAM HOST TARGET GENE, is a human gene contained in the human genome.

[2910] VGAM211 gene, herein designated VGAM GENE, encodes a VGAM211 precursor RNA, herein designated VGAM PRECURSOR RNA. Similar to other miRNA genes, and unlike most ordinary genes, VGAM211 precursor RNA, herein designated VGAM PRECURSOR RNA, does not encode a protein. A nucleotide sequence identical or highly similar to the nucleotide sequence of VGAM211 precursor RNA is designated SEQ ID:197, and is provided hereinbelow with reference to the sequence listing part. Nucleotide sequence SEQ ID:197 is located at position 110025 relative to the genome of Vaccinia virus.

[2911] VGAM211 precursor RNA, herein designated VGAM PRECURSOR RNA, folds onto itself, forming VGAM211 folded precursor RNA, herein designated VGAM FOLDED PRECURSOR RNA, which has a two-dimensional hairpin structure. As is well known in the art, this hairpin structure, is typical of RNA encoded by miRNA genes, and is due to the fact that the nucleotide sequence of the first half of the RNA encoded by a miRNA gene is an accurate or partial inversed-reversed sequence of the nucleotide sequence of the second half thereof.

[2912] An enzyme complex designated DICER COMPLEX, dices the VGAM211 folded precursor RNA, herein designated VGAM FOLDED PRECURSOR RNA, into VGAM211 RNA, herein designated VGAM RNA, a single stranded ˜22 nt long RNA segment. As is known in the art, dicing of a hairpin structured RNA precursor product into a short ˜22 nt RNA segment is catalyzed by an enzyme complex comprising an enzyme called Dicer together with other necessary proteins. A probable (over 79%) nucleotide sequence of VGAM211 RNA is designated SEQ ID:546, and is provided hereinbelow with reference to the sequence listing part.

[2913] VGAM211 host target gene, herein designated VGAM HOST TARGET GENE, encodes a corresponding messenger RNA, VGAM211 host target RNA, herein designated VGAM HOST TARGET RNA. VGAM211 host target RNA, herein designated VGAM HOST TARGET RNA, comprises three regions, as is typical of mRNA of a protein coding gene: a 5 untranslated region, a protein coding region and a 3 untranslated region, designated 5UTR, PROTEIN CODING and 3UTR respectively.

[2914] VGAM211 RNA, herein designated VGAM RNA, binds complementarily to one or more host target binding sites located in untranslated regions of VGAM211 host target RNA, herein designated VGAM HOST TARGET RNA. This complementary binding is due to the fact that the nucleotide sequence of VGAM211 RNA, herein designated VGAM RNA, is an accurate or a partial inversed-reversed sequence of the nucleotide sequence of each of the host target binding sites. As an illustration, FIG. 1 shows 3 such host target binding sites, designated BINDING SITE I, BINDING SITE II and BINDING SITE III respectively. It is appreciated that the number of host target binding sites shown in FIG. 1 is meant as an illustration only, and is not meant to be limiting VGAM211 RNA, herein designated VGAM RNA, may have a different number of host target binding sites in untranslated regions of a VGAM211 host target RNA, herein designated VGAM HOST TARGET RNA. It is further appreciated that while FIG. 1 depicts host target binding sites in the 3UTR region, this is meant as an example only these host target binding sites may be located in the 3UTR region, the 5UTR region, or in both 3UTR and 5UTR regions.

[2915] The complementary binding of VGAM211 RNA, herein designated VGAM RNA, to host target binding sites on VGAM211 host target RNA, herein designated VGAM HOST TARGET RNA, such as BINDING SITE I, BINDING SITE II and BINDING SITE III, inhibits translation of VGAM211 host target RNA, herein designated VGAM HOST TARGET RNA, into VGAM211 host target protein, herein designated VGAM HOST TARGET PROTEIN. VGAM host target protein is therefore outlined by a broken line.

[2916] It is appreciated that VGAM211 host target gene, herein designated VGAM HOST TARGET GENE, in fact represents a plurality of VGAM211 host target genes. The mRNA of each one of this plurality of VGAM211 host target genes comprises one or more host target binding sites, each having a nucleotide sequence which is at least partly complementary to VGAM211 RNA, herein designated VGAM RNA, and which when bound by VGAM211 RNA, herein designated VGAM RNA, causes inhibition of translation of respective one or more VGAM211 host target proteins.

[2917] It is further appreciated by one skilled in the art that the mode of translational inhibition illustrated by FIG. 1 with specific reference to translational inhibition exerted by VGAM211 gene, herein designated VGAM GENE, on one or more VGAM211 host target gene, herein designated VGAM HOST TARGET GENE, is in fact common to other known non-viral miRNA genes. As mentioned hereinabove with reference to the background section, although a specific complementary binding site has been demonstrated only for some of the known miRNA genes (primarily Lin-4 and Let-7), all other recently discovered miRNA genes are also believed by those skilled in the art to modulate expression of other genes by complementary binding, although specific complementary binding sites of these other miRNA genes have not yet been found (Ruvkun G., Perspective: Glimpses of a tiny RNA world, Science 294, 779 (2001)).

[2918] It is yet further appreciated that a function of VGAM211 is inhibition of expression of host target genes, as part of a novel viral mechanism of attacking a host. Accordingly, utilities of VGAM211 include diagnosis, prevention and treatment of viral infection by Vaccinia virus. Specific functions, and accordingly utilities, of VGAM211 correlate with, and may be deduced from, the identity of the host target genes which VGAM211 binds and inhibits, and the function of these host target genes, as elaborated hereinbelow.

[2919] Nucleotide sequences of the VGAM211 precursor RNA, herein designated VGAM PRECURSOR RNA, and of the diced VGAM211 RNA, herein designated VGAM RNA, and a schematic representation of the secondary folding of VGAM211 folded precursor RNA, herein designated VGAM FOLDED PRECURSOR RNA, of VGAM211 are further described hereinbelow with reference to Table 1.

[2920] Nucleotide sequences of host target binding sites, such as BINDING SITE-I, BINDING SITE-II and BINDING SITE-III of FIG. 1, found on, and schematic representation of the complementarity of each of these host target binding sites to VGAM211 RNA, herein designated VGAM RNA, are described hereinbelow with reference to Table 2.

[2921] FIG. 1 further provides a conceptual description of another novel bioinformatically detected viral gene of the present invention, referred to here as Viral Genomic Address Messenger 212 (VGAM212) viral gene, which modulates expression of respective host target genes thereof, the function and utility of which host target genes is known in the art.

[2922] VGAM212 is a novel bioinformatically detected regulatory, non protein coding, viral micro RNA (miRNA) gene. The method by which VGAM212 was detected is described hereinabove with reference to FIGS. 2-8.

[2923] VGAM212 gene, herein designated VGAM GENE, is a viral gene contained in the genome of Vaccinia virus. VGAM212 host target gene, herein designated VGAM HOST TARGET GENE, is a human gene contained in the human genome.

[2924] VGAM212 gene, herein designated VGAM GENE, encodes a VGAM212 precursor RNA, herein designated VGAM PRECURSOR RNA. Similar to other miRNA genes, and unlike most ordinary genes, VGAM212 precursor RNA, herein designated VGAM PRECURSOR RNA, does not encode a protein. A nucleotide sequence identical or highly similar to the nucleotide sequence of VGAM212 precursor RNA is designated SEQ ID:198, and is provided hereinbelow with reference to the sequence listing part. Nucleotide sequence SEQ ID:198 is located at position 111922 relative to the genome of Vaccinia virus.

[2925] VGAM212 precursor RNA, herein designated VGAM PRECURSOR RNA, folds onto itself, forming VGAM212 folded precursor RNA, herein designated VGAM FOLDED PRECURSOR RNA, which has a two-dimensional hairpin structure. As is well known in the art, this hairpin structure, is typical of RNA encoded by miRNA genes, and is due to the fact that the nucleotide sequence of the first half of the RNA encoded by a miRNA gene is an accurate or partial inversed-reversed sequence of the nucleotide sequence of the second half thereof.

[2926] An enzyme complex designated DICER COMPLEX, dices the VGAM212 folded precursor RNA, herein designated VGAM FOLDED PRECURSOR RNA, into VGAM212 RNA, herein designated VGAM RNA, a single stranded ˜22 nt long RNA segment. As is known in the art, dicing of a hairpin structured RNA precursor product into a short ˜22 nt RNA segment is catalyzed by an enzyme complex comprising an enzyme called Dicer together with other necessary proteins. A probable (over 76%) nucleotide sequence of VGAM212 RNA is designated SEQ ID:547, and is provided hereinbelow with reference to the sequence listing part.

[2927] VGAM212 host target gene, herein designated VGAM HOST TARGET GENE, encodes a corresponding messenger RNA, VGAM212 host target RNA, herein designated VGAM HOST TARGET RNA. VGAM212 host target RNA, herein designated VGAM HOST TARGET RNA, comprises three regions, as is typical of mRNA of a protein coding gene: a 5 untranslated region, a protein coding region and a 3 untranslated region, designated 5UTR, PROTEIN CODING and 3UTR respectively.

[2928] VGAM212 RNA, herein designated VGAM RNA, binds complementarily to one or more host target binding sites located in untranslated regions of VGAM212 host target RNA, herein designated VGAM HOST TARGET RNA. This complementary binding is due to the fact that the nucleotide sequence of VGAM212 RNA, herein designated VGAM RNA, is an accurate or a partial inversed-reversed sequence of the nucleotide sequence of each of the host target binding sites. As an illustration, FIG. 1 shows 3 such host target binding sites, designated BINDING SITE I, BINDING SITE II and BINDING SITE III respectively. It is appreciated that the number of host target binding sites shown in FIG. 1 is meant as an illustration only, and is not meant to be limiting VGAM212 RNA, herein designated VGAM RNA, may have a different number of host target binding sites in untranslated regions of a VGAM212 host target RNA, herein designated VGAM HOST TARGET RNA. It is further appreciated that while FIG. 1 depicts host target binding sites in the 3UTR region, this is meant as an example only these host target binding sites may be located in the 3UTR region, the 5UTR region, or in both 3UTR and 5UTR regions.

[2929] The complementary binding of VGAM212 RNA, herein designated VGAM RNA, to host target binding sites on VGAM212 host target RNA, herein designated VGAM HOST TARGET RNA, such as BINDING SITE I, BINDING SITE II and BINDING SITE III, inhibits translation of VGAM212 host target RNA, herein designated VGAM HOST TARGET RNA, into VGAM212 host target protein, herein designated VGAM HOST TARGET PROTEIN. VGAM host target protein is therefore outlined by a broken line.

[2930] It is appreciated that VGAM212 host target gene, herein designated VGAM HOST TARGET GENE, in fact represents a plurality of VGAM212 host target genes. The mRNA of each one of this plurality of VGAM212 host target genes comprises one or more host target binding sites, each having a nucleotide sequence which is at least partly complementary to VGAM212 RNA, herein designated VGAM RNA, and which when bound by VGAM212 RNA, herein designated VGAM RNA, causes inhibition of translation of respective one or more VGAM212 host target proteins.

[2931] It is further appreciated by one skilled in the art that the mode of translational inhibition illustrated by FIG. 1 with specific reference to translational inhibition exerted by VGAM212 gene, herein designated VGAM GENE, on one or more VGAM212 host target gene, herein designated VGAM HOST TARGET GENE, is in fact common to other known non-viral miRNA genes. As mentioned hereinabove with reference to the background section, although a specific complementary binding site has been demonstrated only for some of the known miRNA genes (primarily Lin-4 and Let-7), all other recently discovered miRNA genes are also believed by those skilled in the art to modulate expression of other genes by complementary binding, although specific complementary binding sites of these other miRNA genes have not yet been found (Ruvkun G., Perspective: Glimpses of a tiny RNA world, Science 294, 779 (2001)).

[2932] It is yet further appreciated that a function of VGAM212 is inhibition of expression of host target genes, as part of a novel viral mechanism of attacking a host. Accordingly, utilities of VGAM212 include diagnosis, prevention and treatment of viral infection by Vaccinia virus. Specific functions, and accordingly utilities, of VGAM212 correlate with, and may be deduced from, the identity of the host target genes which VGAM212 binds and inhibits, and the function of these host target genes, as elaborated hereinbelow.

[2933] Nucleotide sequences of the VGAM212 precursor RNA, herein designated VGAM PRECURSOR RNA, and of the diced VGAM212 RNA, herein designated VGAM RNA, and a schematic representation of the secondary folding of VGAM212 folded precursor RNA, herein designated VGAM FOLDED PRECURSOR RNA, of VGAM212 are further described hereinbelow with reference to Table 1.

[2934] Nucleotide sequences of host target binding sites, such as BINDING SITE-I, BINDING SITE-II and BINDING SITE-III of FIG. 1, found on, and schematic representation of the complementarity of each of these host target binding sites to VGAM212 RNA, herein designated VGAM RNA, are described hereinbelow with reference to Table 2.

[2935] FIG. 1 further provides a conceptual description of another novel bioinformatically detected viral gene of the present invention, referred to here as Viral Genomic Address Messenger 213 (VGAM213) viral gene, which modulates expression of respective host target genes thereof, the function and utility of which host target genes is known in the art.

[2936] VGAM213 is a novel bioinformatically detected regulatory, non protein coding, viral micro RNA (miRNA) gene. The method by which VGAM213 was detected is described hereinabove with reference to FIGS. 2-8.

[2937] VGAM213 gene, herein designated VGAM GENE, is a viral gene contained in the genome of Vaccinia virus. VGAM213 host target gene, herein designated VGAM HOST TARGET GENE, is a human gene contained in the human genome.

[2938] VGAM213 gene, herein designated VGAM GENE, encodes a VGAM213 precursor RNA, herein designated VGAM PRECURSOR RNA. Similar to other miRNA genes, and unlike most ordinary genes, VGAM213 precursor RNA, herein designated VGAM PRECURSOR RNA, does not encode a protein. A nucleotide sequence identical or highly similar to the nucleotide sequence of VGAM213 precursor RNA is designated SEQ ID:199, and is provided hereinbelow with reference to the sequence listing part. Nucleotide sequence SEQ ID:199 is located at position 112175 relative to the genome of Vaccinia virus.

[2939] VGAM213 precursor RNA, herein designated VGAM PRECURSOR RNA, folds onto itself, forming VGAM213 folded precursor RNA, herein designated VGAM FOLDED PRECURSOR RNA, which has a two-dimensional hairpin structure. As is well known in the art, this hairpin structure, is typical of RNA encoded by miRNA genes, and is due to the fact that the nucleotide sequence of the first half of the RNA encoded by a miRNA gene is an accurate or partial inversed-reversed sequence of the nucleotide sequence of the second half thereof.

[2940] An enzyme complex designated DICER COMPLEX, dices the VGAM213 folded precursor RNA, herein designated VGAM FOLDED PRECURSOR RNA, into VGAM213 RNA, herein designated VGAM RNA, a single stranded ˜22 nt long RNA segment. As is known in the art, dicing of a hairpin structured RNA precursor product into a short ˜22 nt RNA segment is catalyzed by an enzyme complex comprising an enzyme called Dicer together with other necessary proteins. A probable (over 84%) nucleotide sequence of VGAM213 RNA is designated SEQ ID:548, and is provided hereinbelow with reference to the sequence listing part.

[2941] VGAM213 host target gene, herein designated VGAM HOST TARGET GENE, encodes a corresponding messenger RNA, VGAM213 host target RNA, herein designated VGAM HOST TARGET RNA. VGAM213 host target RNA, herein designated VGAM HOST TARGET RNA, comprises three regions, as is typical of mRNA of a protein coding gene: a 5 untranslated region, a protein coding region and a 3 untranslated region, designated 5UTR, PROTEIN CODING and 3UTR respectively.

[2942] VGAM213 RNA, herein designated VGAM RNA, binds complementarily to one or more host target binding sites located in untranslated regions of VGAM213 host target RNA, herein designated VGAM HOST TARGET RNA. This complementary binding is due to the fact that the nucleotide sequence of VGAM213 RNA, herein designated VGAM RNA, is an accurate or a partial inversed-reversed sequence of the nucleotide sequence of each of the host target binding sites. As an illustration, FIG. 1 shows 3 such host target binding sites, designated BINDING SITE I, BINDING SITE II and BINDING SITE III respectively. It is appreciated that the number of host target binding sites shown in FIG. 1 is meant as an illustration only, and is not meant to be limiting VGAM213 RNA, herein designated VGAM RNA, may have a different number of host target binding sites in untranslated regions of a VGAM213 host target RNA, herein designated VGAM HOST TARGET RNA. It is further appreciated that while FIG. 1 depicts host target binding sites in the 3UTR region, this is meant as an example only these host target binding sites may be located in the 3UTR region, the 5UTR region, or in both 3UTR and 5UTR regions.

[2943] The complementary binding of VGAM213 RNA, herein designated VGAM RNA, to host target binding sites on VGAM213 host target RNA, herein designated VGAM HOST TARGET RNA, such as BINDING SITE I, BINDING SITE II and BINDING SITE III, inhibits translation of VGAM213 host target RNA, herein designated VGAM HOST TARGET RNA, into VGAM213 host target protein, herein designated VGAM HOST TARGET PROTEIN. VGAM host target protein is therefore outlined by a broken line.

[2944] It is appreciated that VGAM213 host target gene, herein designated VGAM HOST TARGET GENE, in fact represents a plurality of VGAM213 host target genes. The mRNA of each one of this plurality of VGAM213 host target genes comprises one or more host target binding sites, each having a nucleotide sequence which is at least partly complementary to VGAM213 RNA, herein designated VGAM RNA, and which when bound by VGAM213 RNA, herein designated VGAM RNA, causes inhibition of translation of respective one or more VGAM213 host target proteins.

[2945] It is further appreciated by one skilled in the art that the mode of translational inhibition illustrated by FIG. 1 with specific reference to translational inhibition exerted by VGAM213 gene, herein designated VGAM GENE, on one or more VGAM213 host target gene, herein designated VGAM HOST TARGET GENE, is in fact common to other known non-viral miRNA genes. As mentioned hereinabove with reference to the background section, although a specific complementary binding site has been demonstrated only for some of the known miRNA genes (primarily Lin-4 and Let-7), all other recently discovered miRNA genes are also believed by those skilled in the art to modulate expression of other genes by complementary binding, although specific complementary binding sites of these other miRNA genes have not yet been found (Ruvkun G., Perspective: Glimpses of a tiny RNA world, Science 294, 779 (2001)).

[2946] It is yet further appreciated that a function of VGAM213 is inhibition of expression of host target genes, as part of a novel viral mechanism of attacking a host. Accordingly, utilities of VGAM213 include diagnosis, prevention and treatment of viral infection by Vaccinia virus. Specific functions, and accordingly utilities, of VGAM213 correlate with, and may be deduced from, the identity of the host target genes which VGAM213 binds and inhibits, and the function of these host target genes, as elaborated hereinbelow.

[2947] Nucleotide sequences of the VGAM213 precursor RNA, herein designated VGAM PRECURSOR RNA, and of the diced VGAM213 RNA, herein designated VGAM RNA, and a schematic representation of the secondary folding of VGAM213 folded precursor RNA, herein designated VGAM FOLDED PRECURSOR RNA, of VGAM213 are further described hereinbelow with reference to Table 1.

[2948] Nucleotide sequences of host target binding sites, such as BINDING SITE-I, BINDING SITE-II and BINDING SITE-III of FIG. 1, found on, and schematic representation of the complementarity of each of these host target binding sites to VGAM213 RNA, herein designated VGAM RNA, are described hereinbelow with reference to Table 2.

[2949] FIG. 1 further provides a conceptual description of another novel bioinformatically detected viral gene of the present invention, referred to here as Viral Genomic Address Messenger 214 (VGAM214) viral gene, which modulates expression of respective host target genes thereof, the function and utility of which host target genes is known in the art.

[2950] VGAM214 is a novel bioinformatically detected regulatory, non protein coding, viral micro RNA (miRNA) gene. The method by which VGAM214 was detected is described hereinabove with reference to FIGS. 2-8.

[2951] VGAM214 gene, herein designated VGAM GENE, is a viral gene contained in the genome of Vaccinia virus. VGAM214 host target gene, herein designated VGAM HOST TARGET GENE, is a human gene contained in the human genome.

[2952] VGAM214 gene, herein designated VGAM GENE, encodes a VGAM214 precursor RNA, herein designated VGAM PRECURSOR RNA. Similar to other miRNA genes, and unlike most ordinary genes, VGAM214 precursor RNA, herein designated VGAM PRECURSOR RNA, does not encode a protein. A nucleotide sequence identical or highly similar to the nucleotide sequence of VGAM214 precursor RNA is designated SEQ ID:200, and is provided hereinbelow with reference to the sequence listing part. Nucleotide sequence SEQ ID:200 is located at position 114150 relative to the genome of Vaccinia virus.

[2953] VGAM214 precursor RNA, herein designated VGAM PRECURSOR RNA, folds onto itself, forming VGAM214 folded precursor RNA, herein designated VGAM FOLDED PRECURSOR RNA, which has a two-dimensional hairpin structure. As is well known in the art, this hairpin structure, is typical of RNA encoded by miRNA genes, and is due to the fact that the nucleotide sequence of the first half of the RNA encoded by a miRNA gene is an accurate or partial inversed-reversed sequence of the nucleotide sequence of the second half thereof.

[2954] An enzyme complex designated DICER COMPLEX, dices the VGAM214 folded precursor RNA, herein designated VGAM FOLDED PRECURSOR RNA, into VGAM214 RNA, herein designated VGAM RNA, a single stranded ˜22 nt long RNA segment. As is known in the art, dicing of a hairpin structured RNA precursor product into a short ˜22 nt RNA segment is catalyzed by an enzyme complex comprising an enzyme called Dicer together with other necessary proteins. A probable (over 75%) nucleotide sequence of VGAM214 RNA is designated SEQ ID:549, and is provided hereinbelow with reference to the sequence listing part.

[2955] VGAM214 host target gene, herein designated VGAM HOST TARGET GENE, encodes a corresponding messenger RNA, VGAM214 host target RNA, herein designated VGAM HOST TARGET RNA. VGAM214 host target RNA, herein designated VGAM HOST TARGET RNA, comprises three regions, as is typical of mRNA of a protein coding gene: a 5 untranslated region, a protein coding region and a 3 untranslated region, designated 5UTR, PROTEIN CODING and 3UTR respectively.

[2956] VGAM214 RNA, herein designated VGAM RNA, binds complementarily to one or more host target binding sites located in untranslated regions of VGAM214 host target RNA, herein designated VGAM HOST TARGET RNA. This complementary binding is due to the fact that the nucleotide sequence of VGAM214 RNA, herein designated VGAM RNA, is an accurate or a partial inversed-reversed sequence of the nucleotide sequence of each of the host target binding sites. As an illustration, FIG. 1 shows 3 such host target binding sites, designated BINDING SITE I, BINDING SITE II and BINDING SITE III respectively. It is appreciated that the number of host target binding sites shown in FIG. 1 is meant as an illustration only, and is not meant to be limiting VGAM214 RNA, herein designated VGAM RNA, may have a different number of host target binding sites in untranslated regions of a VGAM214 host target RNA, herein designated VGAM HOST TARGET RNA. It is further appreciated that while FIG. 1 depicts host target binding sites in the 3UTR region, this is meant as an example only these host target binding sites may be located in the 3UTR region, the 5UTR region, or in both 3UTR and 5UTR regions.

[2957] The complementary binding of VGAM214 RNA, herein designated VGAM RNA, to host target binding sites on VGAM214 host target RNA, herein designated VGAM HOST TARGET RNA, such as BINDING SITE I, BINDING SITE II and BINDING SITE III, inhibits translation of VGAM214 host target RNA, herein designated VGAM HOST TARGET RNA, into VGAM214 host target protein, herein designated VGAM HOST TARGET PROTEIN. VGAM host target protein is therefore outlined by a broken line.

[2958] It is appreciated that VGAM214 host target gene, herein designated VGAM HOST TARGET GENE, in fact represents a plurality of VGAM214 host target genes. The mRNA of each one of this plurality of VGAM214 host target genes comprises one or more host target binding sites, each having a nucleotide sequence which is at least partly complementary to VGAM214 RNA, herein designated VGAM RNA, and which when bound by VGAM214 RNA, herein designated VGAM RNA, causes inhibition of translation of respective one or more VGAM214 host target proteins.

[2959] It is further appreciated by one skilled in the art that the mode of translational inhibition illustrated by FIG. 1 with specific reference to translational inhibition exerted by VGAM214 gene, herein designated VGAM GENE, on one or more VGAM214 host target gene, herein designated VGAM HOST TARGET GENE, is in fact common to other known non-viral miRNA genes. As mentioned hereinabove with reference to the background section, although a specific complementary binding site has been demonstrated only for some of the known miRNA genes (primarily Lin-4 and Let-7), all other recently discovered miRNA genes are also believed by those skilled in the art to modulate expression of other genes by complementary binding, although specific complementary binding sites of these other miRNA genes have not yet been found (Ruvkun G., Perspective: Glimpses of a tiny RNA world, Science 294, 779 (2001)).

[2960] It is yet further appreciated that a function of VGAM214 is inhibition of expression of host target genes, as part of a novel viral mechanism of attacking a host. Accordingly, utilities of VGAM214 include diagnosis, prevention and treatment of viral infection by Vaccinia virus. Specific functions, and accordingly utilities, of VGAM214 correlate with, and may be deduced from, the identity of the host target genes which VGAM214 binds and inhibits, and the function of these host target genes, as elaborated hereinbelow.

[2961] Nucleotide sequences of the VGAM214 precursor RNA, herein designated VGAM PRECURSOR RNA, and of the diced VGAM214 RNA, herein designated VGAM RNA, and a schematic representation of the secondary folding of VGAM214 folded precursor RNA, herein designated VGAM FOLDED PRECURSOR RNA, of VGAM214 are further described hereinbelow with reference to Table 1.

[2962] Nucleotide sequences of host target binding sites, such as BINDING SITE-I, BINDING SITE-II and BINDING SITE-III of FIG. 1, found on, and schematic representation of the complementarity of each of these host target binding sites to VGAM214 RNA, herein designated VGAM RNA, are described hereinbelow with reference to Table 2.

[2963] FIG. 1 further provides a conceptual description of another novel bioinformatically detected viral gene of the present invention, referred to here as Viral Genomic Address Messenger 215 (VGAM215) viral gene, which modulates expression of respective host target genes thereof, the function and utility of which host target genes is known in the art.

[2964] VGAM215 is a novel bioinformatically detected regulatory, non protein coding, viral micro RNA (miRNA) gene. The method by which VGAM215 was detected is described hereinabove with reference to FIGS. 2-8.

[2965] VGAM215 gene, herein designated VGAM GENE, is a viral gene contained in the genome of Vaccinia virus. VGAM215 host target gene, herein designated VGAM HOST TARGET GENE, is a human gene contained in the human genome.

[2966] VGAM215 gene, herein designated VGAM GENE, encodes a VGAM215 precursor RNA, herein designated VGAM PRECURSOR RNA. Similar to other miRNA genes, and unlike most ordinary genes, VGAM215 precursor RNA, herein designated VGAM PRECURSOR RNA, does not encode a protein. A nucleotide sequence identical or highly similar to the nucleotide sequence of VGAM215 precursor RNA is designated SEQ ID:201, and is provided hereinbelow with reference to the sequence listing part. Nucleotide sequence SEQ ID:201 is located at position 113419 relative to the genome of Vaccinia virus.

[2967] VGAM215 precursor RNA, herein designated VGAM PRECURSOR RNA, folds onto itself, forming VGAM215 folded precursor RNA, herein designated VGAM FOLDED PRECURSOR RNA, which has a two-dimensional hairpin structure. As is well known in the art, this hairpin structure, is typical of RNA encoded by miRNA genes, and is due to the fact that the nucleotide sequence of the first half of the RNA encoded by a miRNA gene is an accurate or partial inversed-reversed sequence of the nucleotide sequence of the second half thereof.

[2968] An enzyme complex designated DICER COMPLEX, dices the VGAM215 folded precursor RNA, herein designated VGAM FOLDED PRECURSOR RNA, into VGAM215 RNA, herein designated VGAM RNA, a single stranded ˜22 nt long RNA segment. As is known in the art, dicing of a hairpin structured RNA precursor product into a short ˜22 nt RNA segment is catalyzed by an enzyme complex comprising an enzyme called Dicer together with other necessary proteins. A probable (over 82%) nucleotide sequence of VGAM215 RNA is designated SEQ ID:550, and is provided hereinbelow with reference to the sequence listing part.

[2969] VGAM215 host target gene, herein designated VGAM HOST TARGET GENE, encodes a corresponding messenger RNA, VGAM215 host target RNA, herein designated VGAM HOST TARGET RNA. VGAM215 host target RNA, herein designated VGAM HOST TARGET RNA, comprises three regions, as is typical of mRNA of a protein coding gene: a 5 untranslated region, a protein coding region and a 3 untranslated region, designated 5UTR, PROTEIN CODING and 3UTR respectively.

[2970] VGAM215 RNA, herein designated VGAM RNA, binds complementarily to one or more host target binding sites located in untranslated regions of VGAM215 host target RNA, herein designated VGAM HOST TARGET RNA. This complementary binding is due to the fact that the nucleotide sequence of VGAM215 RNA, herein designated VGAM RNA, is an accurate or a partial inversed-reversed sequence of the nucleotide sequence of each of the host target binding sites. As an illustration, FIG. 1 shows 3 such host target binding sites, designated BINDING SITE I, BINDING SITE II and BINDING SITE III respectively. It is appreciated that the number of host target binding sites shown in FIG. 1 is meant as an illustration only, and is not meant to be limiting VGAM215 RNA, herein designated VGAM RNA, may have a different number of host target binding sites in untranslated regions of a VGAM215 host target RNA, herein designated VGAM HOST TARGET RNA. It is further appreciated that while FIG. 1 depicts host target binding sites in the 3UTR region, this is meant as an example only these host target binding sites may be located in the 3UTR region, the 5UTR region, or in both 3UTR and 5UTR regions.

[2971] The complementary binding of VGAM215 RNA, herein designated VGAM RNA, to host target binding sites on VGAM215 host target RNA, herein designated VGAM HOST TARGET RNA, such as BINDING SITE I, BINDING SITE II and BINDING SITE III, inhibits translation of VGAM215 host target RNA, herein designated VGAM HOST TARGET RNA, into VGAM215 host target protein, herein designated VGAM HOST TARGET PROTEIN. VGAM host target protein is therefore outlined by a broken line.

[2972] It is appreciated that VGAM215 host target gene, herein designated VGAM HOST TARGET GENE, in fact represents a plurality of VGAM215 host target genes. The mRNA of each one of this plurality of VGAM215 host target genes comprises one or more host target binding sites, each having a nucleotide sequence which is at least partly complementary to VGAM215 RNA, herein designated VGAM RNA, and which when bound by VGAM215 RNA, herein designated VGAM RNA, causes inhibition of translation of respective one or more VGAM215 host target proteins.

[2973] It is further appreciated by one skilled in the art that the mode of translational inhibition illustrated by FIG. 1 with specific reference to translational inhibition exerted by VGAM215 gene, herein designated VGAM GENE, on one or more VGAM215 host target gene, herein designated VGAM HOST TARGET GENE, is in fact common to other known non-viral miRNA genes. As mentioned hereinabove with reference to the background section, although a specific complementary binding site has been demonstrated only for some of the known miRNA genes (primarily Lin-4 and Let-7), all other recently discovered miRNA genes are also believed by those skilled in the art to modulate expression of other genes by complementary binding, although specific complementary binding sites of these other miRNA genes have not yet been found (Ruvkun G., Perspective: Glimpses of a tiny RNA world, Science 294, 779 (2001)).

[2974] It is yet further appreciated that a function of VGAM215 is inhibition of expression of host target genes, as part of a novel viral mechanism of attacking a host. Accordingly, utilities of VGAM215 include diagnosis, prevention and treatment of viral infection by Vaccinia virus. Specific functions, and accordingly utilities, of VGAM215 correlate with, and may be deduced from, the identity of the host target genes which VGAM215 binds and inhibits, and the function of these host target genes, as elaborated hereinbelow.

[2975] Nucleotide sequences of the VGAM215 precursor RNA, herein designated VGAM PRECURSOR RNA, and of the diced VGAM215 RNA, herein designated VGAM RNA, and a schematic representation of the secondary folding of VGAM215 folded precursor RNA, herein designated VGAM FOLDED PRECURSOR RNA, of VGAM215 are further described hereinbelow with reference to Table 1.

[2976] Nucleotide sequences of host target binding sites, such as BINDING SITE-I, BINDING SITE-II and BINDING SITE-III of FIG. 1, found on, and schematic representation of the complementarity of each of these host target binding sites to VGAM215 RNA, herein designated VGAM RNA, are described hereinbelow with reference to Table 2.

[2977] FIG. 1 further provides a conceptual description of another novel bioinformatically detected viral gene of the present invention, referred to here as Viral Genomic Address Messenger 216 (VGAM216) viral gene, which modulates expression of respective host target genes thereof, the function and utility of which host target genes is known in the art.

[2978] VGAM216 is a novel bioinformatically detected regulatory, non protein coding, viral micro RNA (miRNA) gene. The method by which VGAM216 was detected is described hereinabove with reference to FIGS. 2-8.

[2979] VGAM216 gene, herein designated VGAM GENE, is a viral gene contained in the genome of Vaccinia virus. VGAM216 host target gene, herein designated VGAM HOST TARGET GENE, is a human gene contained in the human genome.

[2980] VGAM216 gene, herein designated VGAM GENE, encodes a VGAM216 precursor RNA, herein designated VGAM PRECURSOR RNA. Similar to other miRNA genes, and unlike most ordinary genes, VGAM216 precursor RNA, herein designated VGAM PRECURSOR RNA, does not encode a protein. A nucleotide sequence identical or highly similar to the nucleotide sequence of VGAM216 precursor RNA is designated SEQ ID:202, and is provided hereinbelow with reference to the sequence listing part. Nucleotide sequence SEQ ID:202 is located at position 112722 relative to the genome of Vaccinia virus.

[2981] VGAM216 precursor RNA, herein designated VGAM PRECURSOR RNA, folds onto itself, forming VGAM216 folded precursor RNA, herein designated VGAM FOLDED PRECURSOR RNA, which has a two-dimensional hairpin structure. As is well known in the art, this hairpin structure, is typical of RNA encoded by miRNA genes, and is due to the fact that the nucleotide sequence of the first half of the RNA encoded by a miRNA gene is an accurate or partial inversed-reversed sequence of the nucleotide sequence of the second half thereof.

[2982] An enzyme complex designated DICER COMPLEX, dices the VGAM216 folded precursor RNA, herein designated VGAM FOLDED PRECURSOR RNA, into VGAM216 RNA, herein designated VGAM RNA, a single stranded ˜22 nt long RNA segment. As is known in the art, dicing of a hairpin structured RNA precursor product into a short ˜22 nt RNA segment is catalyzed by an enzyme complex comprising an enzyme called Dicer together with other necessary proteins. A probable (over 73%) nucleotide sequence of VGAM216 RNA is designated SEQ ID:551, and is provided hereinbelow with reference to the sequence listing part.

[2983] VGAM216 host target gene, herein designated VGAM HOST TARGET GENE, encodes a corresponding messenger RNA, VGAM216 host target RNA, herein designated VGAM HOST TARGET RNA. VGAM216 host target RNA, herein designated VGAM HOST TARGET RNA, comprises three regions, as is typical of mRNA of a protein coding gene: a 5 untranslated region, a protein coding region and a 3 untranslated region, designated 5UTR, PROTEIN CODING and 3UTR respectively.

[2984] VGAM216 RNA, herein designated VGAM RNA, binds complementarily to one or more host target binding sites located in untranslated regions of VGAM216 host target RNA, herein designated VGAM HOST TARGET RNA. This complementary binding is due to the fact that the nucleotide sequence of VGAM216 RNA, herein designated VGAM RNA, is an accurate or a partial inversed-reversed sequence of the nucleotide sequence of each of the host target binding sites. As an illustration, FIG. 1 shows 3 such host target binding sites, designated BINDING SITE I, BINDING SITE II and BINDING SITE III respectively. It is appreciated that the number of host target binding sites shown in FIG. 1 is meant as an illustration only, and is not meant to be limiting VGAM216 RNA, herein designated VGAM RNA, may have a different number of host target binding sites in untranslated regions of a VGAM216 host target RNA, herein designated VGAM HOST TARGET RNA. It is further appreciated that while FIG. 1 depicts host target binding sites in the 3UTR region, this is meant as an example only these host target binding sites may be located in the 3UTR region, the 5UTR region, or in both 3UTR and 5UTR regions.

[2985] The complementary binding of VGAM216 RNA, herein designated VGAM RNA, to host target binding sites on VGAM216 host target RNA, herein designated VGAM HOST TARGET RNA, such as BINDING SITE I, BINDING SITE II and BINDING SITE III, inhibits translation of VGAM216 host target RNA, herein designated VGAM HOST TARGET RNA, into VGAM216 host target protein, herein designated VGAM HOST TARGET PROTEIN. VGAM host target protein is therefore outlined by a broken line.

[2986] It is appreciated that VGAM216 host target gene, herein designated VGAM HOST TARGET GENE, in fact represents a plurality of VGAM216 host target genes. The mRNA of each one of this plurality of VGAM216 host target genes comprises one or more host target binding sites, each having a nucleotide sequence which is at least partly complementary to VGAM216 RNA, herein designated VGAM RNA, and which when bound by VGAM216 RNA, herein designated VGAM RNA, causes inhibition of translation of respective one or more VGAM216 host target proteins.

[2987] It is further appreciated by one skilled in the art that the mode of translational inhibition illustrated by FIG. 1 with specific reference to translational inhibition exerted by VGAM216 gene, herein designated VGAM GENE, on one or more VGAM216 host target gene, herein designated VGAM HOST TARGET GENE, is in fact common to other known non-viral miRNA genes. As mentioned hereinabove with reference to the background section, although a specific complementary binding site has been demonstrated only for some of the known miRNA genes (primarily Lin-4 and Let-7), all other recently discovered miRNA genes are also believed by those skilled in the art to modulate expression of other genes by complementary binding, although specific complementary binding sites of these other miRNA genes have not yet been found (Ruvkun G., Perspective: Glimpses of a tiny RNA world, Science 294, 779 (2001)).

[2988] It is yet further appreciated that a function of VGAM216 is inhibition of expression of host target genes, as part of a novel viral mechanism of attacking a host. Accordingly, utilities of VGAM216 include diagnosis, prevention and treatment of viral infection by Vaccinia virus. Specific functions, and accordingly utilities, of VGAM216 correlate with, and may be deduced from, the identity of the host target genes which VGAM216 binds and inhibits, and the function of these host target genes, as elaborated hereinbelow.

[2989] Nucleotide sequences of the VGAM216 precursor RNA, herein designated VGAM PRECURSOR RNA, and of the diced VGAM216 RNA, herein designated VGAM RNA, and a schematic representation of the secondary folding of VGAM216 folded precursor RNA, herein designated VGAM FOLDED PRECURSOR RNA, of VGAM216 are further described hereinbelow with reference to Table 1.

[2990] Nucleotide sequences of host target binding sites, such as BINDING SITE-I, BINDING SITE-II and BINDING SITE-III of FIG. 1, found on, and schematic representation of the complementarity of each of these host target binding sites to VGAM216 RNA, herein designated VGAM RNA, are described hereinbelow with reference to Table 2.

[2991] FIG. 1 further provides a conceptual description of another novel bioinformatically detected viral gene of the present invention, referred to here as Viral Genomic Address Messenger 217 (VGAM217) viral gene, which modulates expression of respective host target genes thereof, the function and utility of which host target genes is known in the art.

[2992] VGAM217 is a novel bioinformatically detected regulatory, non protein coding, viral micro RNA (miRNA) gene. The method by which VGAM217 was detected is described hereinabove with reference to FIGS. 2-8.

[2993] VGAM217 gene, herein designated VGAM GENE, is a viral gene contained in the genome of Vaccinia virus. VGAM217 host target gene, herein designated VGAM HOST TARGET GENE, is a human gene contained in the human genome.

[2994] VGAM217 gene, herein designated VGAM GENE, encodes a VGAM217 precursor RNA, herein designated VGAM PRECURSOR RNA. Similar to other miRNA genes, and unlike most ordinary genes, VGAM217 precursor RNA, herein designated VGAM PRECURSOR RNA, does not encode a protein. A nucleotide sequence identical or highly similar to the nucleotide sequence of VGAM217 precursor RNA is designated SEQ ID:203, and is provided hereinbelow with reference to the sequence listing part. Nucleotide sequence SEQ ID:203 is located at position 113751 relative to the genome of Vaccinia virus.

[2995] VGAM217 precursor RNA, herein designated VGAM PRECURSOR RNA, folds onto itself, forming VGAM217 folded precursor RNA, herein designated VGAM FOLDED PRECURSOR RNA, which has a two-dimensional hairpin structure. As is well known in the art, this hairpin structure, is typical of RNA encoded by miRNA genes, and is due to the fact that the nucleotide sequence of the first half of the RNA encoded by a miRNA gene is an accurate or partial inversed-reversed sequence of the nucleotide sequence of the second half thereof.

[2996] An enzyme complex designated DICER COMPLEX, dices the VGAM217 folded precursor RNA, herein designated VGAM FOLDED PRECURSOR RNA, into VGAM217 RNA, herein designated VGAM RNA, a single stranded ˜22 nt long RNA segment. As is known in the art, dicing of a hairpin structured RNA precursor product into a short ˜22 nt RNA segment is catalyzed by an enzyme complex comprising an enzyme called Dicer together with other necessary proteins. A probable (over 86%) nucleotide sequence of VGAM217 RNA is designated SEQ ID:552, and is provided hereinbelow with reference to the sequence listing part.

[2997] VGAM217 host target gene, herein designated VGAM HOST TARGET GENE, encodes a corresponding messenger RNA, VGAM217 host target RNA, herein designated VGAM HOST TARGET RNA. VGAM217 host target RNA, herein designated VGAM HOST TARGET RNA, comprises three regions, as is typical of mRNA of a protein coding gene: a 5 untranslated region, a protein coding region and a 3 untranslated region, designated 5UTR, PROTEIN CODING and 3UTR respectively.

[2998] VGAM217 RNA, herein designated VGAM RNA, binds complementarily to one or more host target binding sites located in untranslated regions of VGAM217 host target RNA, herein designated VGAM HOST TARGET RNA. This complementary binding is due to the fact that the nucleotide sequence of VGAM217 RNA, herein designated VGAM RNA, is an accurate or a partial inversed-reversed sequence of the nucleotide sequence of each of the host target binding sites. As an illustration, FIG. 1 shows 3 such host target binding sites, designated BINDING SITE I, BINDING SITE II and BINDING SITE III respectively. It is appreciated that the number of host target binding sites shown in FIG. 1 is meant as an illustration only, and is not meant to be limiting VGAM217 RNA, herein designated VGAM RNA, may have a different number of host target binding sites in untranslated regions of a VGAM217 host target RNA, herein designated VGAM HOST TARGET RNA. It is further appreciated that while FIG. 1 depicts host target binding sites in the 3UTR region, this is meant as an example only these host target binding sites may be located in the 3UTR region, the 5UTR region, or in both 3UTR and 5UTR regions.

[2999] The complementary binding of VGAM217 RNA, herein designated VGAM RNA, to host target binding sites on VGAM217 host target RNA, herein designated VGAM HOST TARGET RNA, such as BINDING SITE I, BINDING SITE II and BINDING SITE III, inhibits translation of VGAM217 host target RNA, herein designated VGAM HOST TARGET RNA, into VGAM217 host target protein, herein designated VGAM HOST TARGET PROTEIN. VGAM host target protein is therefore outlined by a broken line.

[3000] It is appreciated that VGAM217 host target gene, herein designated VGAM HOST TARGET GENE, in fact represents a plurality of VGAM217 host target genes. The mRNA of each one of this plurality of VGAM217 host target genes comprises one or more host target binding sites, each having a nucleotide sequence which is at least partly complementary to VGAM217 RNA, herein designated VGAM RNA, and which when bound by VGAM217 RNA, herein designated VGAM RNA, causes inhibition of translation of respective one or more VGAM217 host target proteins.

[3001] It is further appreciated by one skilled in the art that the mode of translational inhibition illustrated by FIG. 1 with specific reference to translational inhibition exerted by VGAM217 gene, herein designated VGAM GENE, on one or more VGAM217 host target gene, herein designated VGAM HOST TARGET GENE, is in fact common to other known non-viral miRNA genes. As mentioned hereinabove with reference to the background section, although a specific complementary binding site has been demonstrated only for some of the known miRNA genes (primarily Lin-4 and Let-7), all other recently discovered miRNA genes are also believed by those skilled in the art to modulate expression of other genes by complementary binding, although specific complementary binding sites of these other miRNA genes have not yet been found (Ruvkun G., Perspective: Glimpses of a tiny RNA world, Science 294, 779 (2001)).

[3002] It is yet further appreciated that a function of VGAM217 is inhibition of expression of host target genes, as part of a novel viral mechanism of attacking a host. Accordingly, utilities of VGAM217 include diagnosis, prevention and treatment of viral infection by Vaccinia virus. Specific functions, and accordingly utilities, of VGAM217 correlate with, and may be deduced from, the identity of the host target genes which VGAM217 binds and inhibits, and the function of these host target genes, as elaborated hereinbelow.

[3003] Nucleotide sequences of the VGAM217 precursor RNA, herein designated VGAM PRECURSOR RNA, and of the diced VGAM217 RNA, herein designated VGAM RNA, and a schematic representation of the secondary folding of VGAM217 folded precursor RNA, herein designated VGAM FOLDED PRECURSOR RNA, of VGAM217 are further described hereinbelow with reference to Table 1.

[3004] Nucleotide sequences of host target binding sites, such as BINDING SITE-I, BINDING SITE-II and BINDING SITE-III of FIG. 1, found on, and schematic representation of the complementarity of each of these host target binding sites to VGAM217 RNA, herein designated VGAM RNA, are described hereinbelow with reference to Table 2.

[3005] FIG. 1 further provides a conceptual description of another novel bioinformatically detected viral gene of the present invention, referred to here as Viral Genomic Address Messenger 218 (VGAM218) viral gene, which modulates expression of respective host target genes thereof, the function and utility of which host target genes is known in the art.

[3006] VGAM218 is a novel bioinformatically detected regulatory, non protein coding, viral micro RNA (miRNA) gene. The method by which VGAM218 was detected is described hereinabove with reference to FIGS. 2-8.

[3007] VGAM218 gene, herein designated VGAM GENE, is a viral gene contained in the genome of Vaccinia virus. VGAM218 host target gene, herein designated VGAM HOST TARGET GENE, is a human gene contained in the human genome.

[3008] VGAM218 gene, herein designated VGAM GENE, encodes a VGAM218 precursor RNA, herein designated VGAM PRECURSOR RNA. Similar to other miRNA genes, and unlike most ordinary genes, VGAM218 precursor RNA, herein designated VGAM PRECURSOR RNA, does not encode a protein. A nucleotide sequence identical or highly similar to the nucleotide sequence of VGAM218 precursor RNA is designated SEQ ID:204, and is provided hereinbelow with reference to the sequence listing part. Nucleotide sequence SEQ ID:204 is located at position 114325 relative to the genome of Vaccinia virus.

[3009] VGAM218 precursor RNA, herein designated VGAM PRECURSOR RNA, folds onto itself, forming VGAM218 folded precursor RNA, herein designated VGAM FOLDED PRECURSOR RNA, which has a two-dimensional hairpin structure. As is well known in the art, this hairpin structure, is typical of RNA encoded by miRNA genes, and is due to the fact that the nucleotide sequence of the first half of the RNA encoded by a miRNA gene is an accurate or partial inversed-reversed sequence of the nucleotide sequence of the second half thereof.

[3010] An enzyme complex designated DICER COMPLEX, dices the VGAM218 folded precursor RNA, herein designated VGAM FOLDED PRECURSOR RNA, into VGAM218 RNA, herein designated VGAM RNA, a single stranded ˜22 nt long RNA segment. As is known in the art, dicing of a hairpin structured RNA precursor product into a short ˜22 nt RNA segment is catalyzed by an enzyme complex comprising an enzyme called Dicer together with other necessary proteins. A probable (over 73%) nucleotide sequence of VGAM218 RNA is designated SEQ ID:553, and is provided hereinbelow with reference to the sequence listing part.

[3011] VGAM218 host target gene, herein designated VGAM HOST TARGET GENE, encodes a corresponding messenger RNA, VGAM218 host target RNA, herein designated VGAM HOST TARGET RNA. VGAM218 host target RNA, herein designated VGAM HOST TARGET RNA, comprises three regions, as is typical of mRNA of a protein coding gene: a 5 untranslated region, a protein coding region and a 3 untranslated region, designated 5UTR, PROTEIN CODING and 3UTR respectively.

[3012] VGAM218 RNA, herein designated VGAM RNA, binds complementarily to one or more host target binding sites located in untranslated regions of VGAM218 host target RNA, herein designated VGAM HOST TARGET RNA. This complementary binding is due to the fact that the nucleotide sequence of VGAM218 RNA, herein designated VGAM RNA, is an accurate or a partial inversed-reversed sequence of the nucleotide sequence of each of the host target binding sites. As an illustration, FIG. 1 shows 3 such host target binding sites, designated BINDING SITE I, BINDING SITE II and BINDING SITE III respectively. It is appreciated that the number of host target binding sites shown in FIG. 1 is meant as an illustration only, and is not meant to be limiting VGAM218 RNA, herein designated VGAM RNA, may have a different number of host target binding sites in untranslated regions of a VGAM218 host target RNA, herein designated VGAM HOST TARGET RNA. It is further appreciated that while FIG. 1 depicts host target binding sites in the 3UTR region, this is meant as an example only these host target binding sites may be located in the 3UTR region, the 5UTR region, or in both 3UTR and 5UTR regions.

[3013] The complementary binding of VGAM218 RNA, herein designated VGAM RNA, to host target binding sites on VGAM218 host target RNA, herein designated VGAM HOST TARGET RNA, such as BINDING SITE I, BINDING SITE II and BINDING SITE III, inhibits translation of VGAM218 host target RNA, herein designated VGAM HOST TARGET RNA, into VGAM218 host target protein, herein designated VGAM HOST TARGET PROTEIN. VGAM host target protein is therefore outlined by a broken line.

[3014] It is appreciated that VGAM218 host target gene, herein designated VGAM HOST TARGET GENE, in fact represents a plurality of VGAM218 host target genes. The mRNA of each one of this plurality of VGAM218 host target genes comprises one or more host target binding sites, each having a nucleotide sequence which is at least partly complementary to VGAM218 RNA, herein designated VGAM RNA, and which when bound by VGAM218 RNA, herein designated VGAM RNA, causes inhibition of translation of respective one or more VGAM218 host target proteins.

[3015] It is further appreciated by one skilled in the art that the mode of translational inhibition illustrated by FIG. 1 with specific reference to translational inhibition exerted by VGAM218 gene, herein designated VGAM GENE, on one or more VGAM218 host target gene, herein designated VGAM HOST TARGET GENE, is in fact common to other known non-viral miRNA genes. As mentioned hereinabove with reference to the background section, although a specific complementary binding site has been demonstrated only for some of the known miRNA genes (primarily Lin-4 and Let-7), all other recently discovered miRNA genes are also believed by those skilled in the art to modulate expression of other genes by complementary binding, although specific complementary binding sites of these other miRNA genes have not yet been found (Ruvkun G., Perspective: Glimpses of a tiny RNA world, Science 294, 779 (2001)).

[3016] it is yet further appreciated that a function of VGAM218 is inhibition of expression of host target genes, as part of a novel viral mechanism of attacking a host. Accordingly, utilities of VGAM218 include diagnosis, prevention and treatment of viral infection by Vaccinia virus. Specific functions, and accordingly utilities, of VGAM218 correlate with, and may be deduced from, the identity of the host target genes which VGAM218 binds and inhibits, and the function of these host target genes, as elaborated hereinbelow.

[3017] Nucleotide sequences of the VGAM218 precursor RNA, herein designated VGAM PRECURSOR RNA, and of the diced VGAM218 RNA, herein designated VGAM RNA, and a schematic representation of the secondary folding of VGAM218 folded precursor RNA, herein designated VGAM FOLDED PRECURSOR RNA, of VGAM218 are further described hereinbelow with reference to Table 1.

[3018] Nucleotide sequences of host target binding sites, such as BINDING SITE-I, BINDING SITE-II and BINDING SITE-III of FIG. 1, found on, and schematic representation of the complementarity of each of these host target binding sites to VGAM218 RNA, herein designated VGAM RNA, are described hereinbelow with reference to Table 2.

[3019] FIG. 1 further provides a conceptual description of another novel bioinformatically detected viral gene of the present invention, referred to here as Viral Genomic Address Messenger 219 (VGAM219) viral gene, which modulates expression of respective host target genes thereof, the function and utility of which host target genes is known in the art.

[3020] VGAM219 is a novel bioinformatically detected regulatory, non protein coding, viral micro RNA (miRNA) gene. The method by which VGAM219 was detected is described hereinabove with reference to FIGS. 2-8.

[3021] VGAM219 gene, herein designated VGAM GENE, is a viral gene contained in the genome of Vaccinia virus. VGAM219 host target gene, herein designated VGAM HOST TARGET GENE, is a human gene contained in the human genome.

[3022] VGAM219 gene, herein designated VGAM GENE, encodes a VGAM219 precursor RNA, herein designated VGAM PRECURSOR RNA. Similar to other miRNA genes, and unlike most ordinary genes, VGAM219 precursor RNA, herein designated VGAM PRECURSOR RNA, does not encode a protein. A nucleotide sequence identical or highly similar to the nucleotide sequence of VGAM219 precursor RNA is designated SEQ ID:205, and is provided hereinbelow with reference to the sequence listing part. Nucleotide sequence SEQ ID:205 is located at position 115962 relative to the genome of Vaccinia virus.

[3023] VGAM219 precursor RNA, herein designated VGAM PRECURSOR RNA, folds onto itself, forming VGAM219 folded precursor RNA, herein designated VGAM FOLDED PRECURSOR RNA, which has a two-dimensional hairpin structure. As is well known in the art, this hairpin structure, is typical of RNA encoded by miRNA genes, and is due to the fact that the nucleotide sequence of the first half of the RNA encoded by a miRNA gene is an accurate or partial inversed-reversed sequence of the nucleotide sequence of the second half thereof.

[3024] An enzyme complex designated DICER COMPLEX, dices the VGAM219 folded precursor RNA, herein designated VGAM FOLDED PRECURSOR RNA, into VGAM219 RNA, herein designated VGAM RNA, a single stranded ˜22 nt long RNA segment. As is known in the art, dicing of a hairpin structured RNA precursor product into a short ˜22 nt RNA segment is catalyzed by an enzyme complex comprising an enzyme called Dicer together with other necessary proteins. A probable (over 83%) nucleotide sequence of VGAM219 RNA is designated SEQ ID:554, and is provided hereinbelow with reference to the sequence listing part.

[3025] VGAM219 host target gene, herein designated VGAM HOST TARGET GENE, encodes a corresponding messenger RNA, VGAM219 host target RNA, herein designated VGAM HOST TARGET RNA. VGAM219 host target RNA, herein designated VGAM HOST TARGET RNA, comprises three regions, as is typical of mRNA of a protein coding gene: a 5 untranslated region, a protein coding region and a 3 untranslated region, designated 5UTR, PROTEIN CODING and 3UTR respectively.

[3026] VGAM219 RNA, herein designated VGAM RNA, binds complementarily to one or more host target binding sites located in untranslated regions of VGAM219 host target RNA, herein designated VGAM HOST TARGET RNA. This complementary binding is due to the fact that the nucleotide sequence of VGAM219 RNA, herein designated VGAM RNA, is an accurate or a partial inversed-reversed sequence of the nucleotide sequence of each of the host target binding sites. As an illustration, FIG. 1 shows 3 such host target binding sites, designated BINDING SITE I, BINDING SITE II and BINDING SITE III respectively. It is appreciated that the number of host target binding sites shown in FIG. 1 is meant as an illustration only, and is not meant to be limiting VGAM219 RNA, herein designated VGAM RNA, may have a different number of host target binding sites in untranslated regions of a VGAM219 host target RNA, herein designated VGAM HOST TARGET RNA. It is further appreciated that while FIG. 1 depicts host target binding sites in the 3UTR region, this is meant as an example only these host target binding sites may be located in the 3UTR region, the 5UTR region, or in both 3UTR and 5UTR regions.

[3027] The complementary binding of VGAM219 RNA, herein designated VGAM RNA, to host target binding sites on VGAM219 host target RNA, herein designated VGAM HOST TARGET RNA, such as BINDING SITE I, BINDING SITE II and BINDING SITE III, inhibits translation of VGAM219 host target RNA, herein designated VGAM HOST TARGET RNA, into VGAM219 host target protein, herein designated VGAM HOST TARGET PROTEIN. VGAM host target protein is therefore outlined by a broken line.

[3028] It is appreciated that VGAM219 host target gene, herein designated VGAM HOST TARGET GENE, in fact represents a plurality of VGAM219 host target genes. The mRNA of each one of this plurality of VGAM219 host target genes comprises one or more host target binding sites, each having a nucleotide sequence which is at least partly complementary to VGAM219 RNA, herein designated VGAM RNA, and which when bound by VGAM219 RNA, herein designated VGAM RNA, causes inhibition of translation of respective one or more VGAM219 host target proteins.

[3029] It is further appreciated by one skilled in the art that the mode of translational inhibition illustrated by FIG. 1 with specific reference to translational inhibition exerted by VGAM219 gene, herein designated VGAM GENE, on one or more VGAM219 host target gene, herein designated VGAM HOST TARGET GENE, is in fact common to other known non-viral miRNA genes. As mentioned hereinabove with reference to the background section, although a specific complementary binding site has been demonstrated only for some of the known miRNA genes (primarily Lin-4 and Let-7), all other recently discovered miRNA genes are also believed by those skilled in the art to modulate expression of other genes by complementary binding, although specific complementary binding sites of these other miRNA genes have not yet been found (Ruvkun G., Perspective: Glimpses of a tiny RNA world, Science 294, 779 (2001)).

[3030] It is yet further appreciated that a function of VGAM219 is inhibition of expression of host target genes, as part of a novel viral mechanism of attacking a host. Accordingly, utilities of VGAM219 include diagnosis, prevention and treatment of viral infection by Vaccinia virus. Specific functions, and accordingly utilities, of VGAM219 correlate with, and may be deduced from, the identity of the host target genes which VGAM219 binds and inhibits, and the function of these host target genes, as elaborated hereinbelow.

[3031] Nucleotide sequences of the VGAM219 precursor RNA, herein designated VGAM PRECURSOR RNA, and of the diced VGAM219 RNA, herein designated VGAM RNA, and a schematic representation of the secondary folding of VGAM219 folded precursor RNA, herein designated VGAM FOLDED PRECURSOR RNA, of VGAM219 are further described hereinbelow with reference to Table 1.

[3032] Nucleotide sequences of host target binding sites, such as BINDING SITE-I, BINDING SITE-II and BINDING SITE-III of FIG. 1, found on, and schematic representation of the complementarity of each of these host target binding sites to VGAM219 RNA, herein designated VGAM RNA, are described hereinbelow with reference to Table 2.

[3033] FIG. 1 further provides a conceptual description of another novel bioinformatically detected viral gene of the present invention, referred to here as Viral Genomic Address Messenger 220 (VGAM220) viral gene, which modulates expression of respective host target genes thereof, the function and utility of which host target genes is known in the art.

[3034] VGAM220 is a novel bioinformatically detected regulatory, non protein coding, viral micro RNA (miRNA) gene. The method by which VGAM220 was detected is described hereinabove with reference to FIGS. 2-8.

[3035] VGAM220 gene, herein designated VGAM GENE, is a viral gene contained in the genome of Vaccinia virus. VGAM220 host target gene, herein designated VGAM HOST TARGET GENE, is a human gene contained in the human genome.

[3036] VGAM220 gene, herein designated VGAM GENE, encodes a VGAM220 precursor RNA, herein designated VGAM PRECURSOR RNA. Similar to other miRNA genes, and unlike most ordinary genes, VGAM220 precursor RNA, herein designated VGAM PRECURSOR RNA, does not encode a protein. A nucleotide sequence identical or highly similar to the nucleotide sequence of VGAM220 precursor RNA is designated SEQ ID:206, and is provided hereinbelow with reference to the sequence listing part. Nucleotide sequence SEQ ID:206 is located at position 115869 relative to the genome of Vaccinia virus.

[3037] VGAM220 precursor RNA, herein designated VGAM PRECURSOR RNA, folds onto itself, forming VGAM220 folded precursor RNA, herein designated VGAM FOLDED PRECURSOR RNA, which has a two-dimensional hairpin structure. As is well known in the art, this hairpin structure, is typical of RNA encoded by miRNA genes, and is due to the fact that the nucleotide sequence of the first half of the RNA encoded by a miRNA gene is an accurate or partial inversed-reversed sequence of the nucleotide sequence of the second half thereof.

[3038] An enzyme complex designated DICER COMPLEX, dices the VGAM220 folded precursor RNA, herein designated VGAM FOLDED PRECURSOR RNA, into VGAM220 RNA, herein designated VGAM RNA, a single stranded ˜22 nt long RNA segment. As is known in the art, dicing of a hairpin structured RNA precursor product into a short ˜22 nt RNA segment is catalyzed by an enzyme complex comprising an enzyme called Dicer together with other necessary proteins. A probable (over 84%) nucleotide sequence of VGAM220 RNA is designated SEQ ID:555, and is provided hereinbelow with reference to the sequence listing part.

[3039] VGAM220 host target gene, herein designated VGAM HOST TARGET GENE, encodes a corresponding messenger RNA, VGAM220 host target RNA, herein designated VGAM HOST TARGET RNA. VGAM220 host target RNA, herein designated VGAM HOST TARGET RNA, comprises three regions, as is typical of mRNA of a protein coding gene: a 5 untranslated region, a protein coding region and a 3 untranslated region, designated 5UTR, PROTEIN CODING and 3UTR respectively.

[3040] VGAM220 RNA, herein designated VGAM RNA, binds complementarily to one or more host target binding sites located in untranslated regions of VGAM220 host target RNA, herein designated VGAM HOST TARGET RNA. This complementary binding is due to the fact that the nucleotide sequence of VGAM220 RNA, herein designated VGAM RNA, is an accurate or a partial inversed-reversed sequence of the nucleotide sequence of each of the host target binding sites. As an illustration, FIG. 1 shows 3 such host target binding sites, designated BINDING SITE I, BINDING SITE II and BINDING SITE III respectively. It is appreciated that the number of host target binding sites shown in FIG. 1 is meant as an illustration only, and is not meant to be limiting VGAM220 RNA, herein designated VGAM RNA, may have a different number of host target binding sites in untranslated regions of a VGAM220 host target RNA, herein designated VGAM HOST TARGET RNA. It is further appreciated that while FIG. 1 depicts host target binding sites in the 3UTR region, this is meant as an example only these host target binding sites may be located in the 3UTR region, the 5UTR region, or in both 3UTR and 5UTR regions.

[3041] The complementary binding of VGAM220 RNA, herein designated VGAM RNA, to host target binding sites on VGAM220 host target RNA, herein designated VGAM HOST TARGET RNA, such as BINDING SITE I, BINDING SITE II and BINDING SITE III, inhibits translation of VGAM220 host target RNA, herein designated VGAM HOST TARGET RNA, into VGAM220 host target protein, herein designated VGAM HOST TARGET PROTEIN. VGAM host target protein is therefore outlined by a broken line.

[3042] It is appreciated that VGAM220 host target gene, herein designated VGAM HOST TARGET GENE, in fact represents a plurality of VGAM220 host target genes. The mRNA of each one of this plurality of VGAM220 host target genes comprises one or more host target binding sites, each having a nucleotide sequence which is at least partly complementary to VGAM220 RNA, herein designated VGAM RNA, and which when bound by VGAM220 RNA, herein designated VGAM RNA, causes inhibition of translation of respective one or more VGAM220 host target proteins.

[3043] It is further appreciated by one skilled in the art that the mode of translational inhibition illustrated by FIG. 1 with specific reference to translational inhibition exerted by VGAM220 gene, herein designated VGAM GENE, on one or more VGAM220 host target gene, herein designated VGAM HOST TARGET GENE, is in fact common to other known non-viral miRNA genes. As mentioned hereinabove with reference to the background section, although a specific complementary binding site has been demonstrated only for some of the known miRNA genes (primarily Lin-4 and Let-7), all other recently discovered miRNA genes are also believed by those skilled in the art to modulate expression of other genes by complementary binding, although specific complementary binding sites of these other miRNA genes have not yet been found (Ruvkun G., Perspective: Glimpses of a tiny RNA world, Science 294, 779 (2001)).

[3044] It is yet further appreciated that a function of VGAM220 is inhibition of expression of host target genes, as part of a novel viral mechanism of attacking a host. Accordingly, utilities of VGAM220 include diagnosis, prevention and treatment of viral infection by Vaccinia virus. Specific functions, and accordingly utilities, of VGAM220 correlate with, and may be deduced from, the identity of the host target genes which VGAM220 binds and inhibits, and the function of these host target genes, as elaborated hereinbelow.

[3045] Nucleotide sequences of the VGAM220 precursor RNA, herein designated VGAM PRECURSOR RNA, and of the diced VGAM220 RNA, herein designated VGAM RNA, and a schematic representation of the secondary folding of VGAM220 folded precursor RNA, herein designated VGAM FOLDED PRECURSOR RNA, of VGAM220 are further described hereinbelow with reference to Table 1.

[3046] Nucleotide sequences of host target binding sites, such as BINDING SITE-I, BINDING SITE-II and BINDING SITE-III of FIG. 1, found on, and schematic representation of the complementarity of each of these host target binding sites to VGAM220 RNA, herein designated VGAM RNA, are described hereinbelow with reference to Table 2.

[3047] FIG. 1 further provides a conceptual description of another novel bioinformatically detected viral gene of the present invention, referred to here as Viral Genomic Address Messenger 221 (VGAM221) viral gene, which modulates expression of respective host target genes thereof, the function and utility of which host target genes is known in the art.

[3048] VGAM221 is a novel bioinformatically detected regulatory, non protein coding, viral micro RNA (miRNA) gene. The method by which VGAM221 was detected is described hereinabove with reference to FIGS. 2-8.

[3049] VGAM221 gene, herein designated VGAM GENE, is a viral gene contained in the genome of Vaccinia virus. VGAM221 host target gene, herein designated VGAM HOST TARGET GENE, is a human gene contained in the human genome.

[3050] VGAM221 gene, herein designated VGAM GENE, encodes a VGAM221 precursor RNA, herein designated VGAM PRECURSOR RNA. Similar to other miRNA genes, and unlike most ordinary genes, VGAM221 precursor RNA, herein designated VGAM PRECURSOR RNA, does not encode a protein. A nucleotide sequence identical or highly similar to the nucleotide sequence of VGAM221 precursor RNA is designated SEQ ID:207, and is provided hereinbelow with reference to the sequence listing part. Nucleotide sequence SEQ ID:207 is located at position 116795 relative to the genome of Vaccinia virus.

[3051] VGAM221 precursor RNA, herein designated VGAM PRECURSOR RNA, folds onto itself, forming VGAM221 folded precursor RNA, herein designated VGAM FOLDED PRECURSOR RNA, which has a two-dimensional hairpin structure. As is well known in the art, this hairpin structure, is typical of RNA encoded by miRNA genes, and is due to the fact that the nucleotide sequence of the first half of the RNA encoded by a miRNA gene is an accurate or partial inversed-reversed sequence of the nucleotide sequence of the second half thereof.

[3052] An enzyme complex designated DICER COMPLEX, dices the VGAM221 folded precursor RNA, herein designated VGAM FOLDED PRECURSOR RNA, into VGAM221 RNA, herein designated VGAM RNA, a single stranded ˜22 nt long RNA segment. As is known in the art, dicing of a hairpin structured RNA precursor product into a short ˜22 nt RNA segment is catalyzed by an enzyme complex comprising an enzyme called Dicer together with other necessary proteins. A probable (over 73%) nucleotide sequence of VGAM221 RNA is designated SEQ ID:556, and is provided hereinbelow with reference to the sequence listing part.

[3053] VGAM221 host target gene, herein designated VGAM HOST TARGET GENE, encodes a corresponding messenger RNA, VGAM221 host target RNA, herein designated VGAM HOST TARGET RNA. VGAM221 host target RNA, herein designated VGAM HOST TARGET RNA, comprises three regions, as is typical of mRNA of a protein coding gene: a 5 untranslated region, a protein coding region and a 3 untranslated region, designated 5UTR, PROTEIN CODING and 3UTR respectively.

[3054] VGAM221 RNA, herein designated VGAM RNA, binds complementarily to one or more host target binding sites located in untranslated regions of VGAM221 host target RNA, herein designated VGAM HOST TARGET RNA. This complementary binding is due to the fact that the nucleotide sequence of VGAM221 RNA, herein designated VGAM RNA, is an accurate or a partial inversed-reversed sequence of the nucleotide sequence of each of the host target binding sites. As an illustration, FIG. 1 shows 3 such host target binding sites, designated BINDING SITE I, BINDING SITE II and BINDING SITE III respectively. It is appreciated that the number of host target binding sites shown in FIG. 1 is meant as an illustration only, and is not meant to be limiting VGAM221 RNA, herein designated VGAM RNA, may have a different number of host target binding sites in untranslated regions of a VGAM221 host target RNA, herein designated VGAM HOST TARGET RNA. It is further appreciated that while FIG. 1 depicts host target binding sites in the 3UTR region, this is meant as an example only these host target binding sites may be located in the 3UTR region, the 5UTR region, or in both 3UTR and 5UTR regions.

[3055] The complementary binding of VGAM221 RNA, herein designated VGAM RNA, to host target binding sites on VGAM221 host target RNA, herein designated VGAM HOST TARGET RNA, such as BINDING SITE I, BINDING SITE II and BINDING SITE III, inhibits translation of VGAM221 host target RNA, herein designated VGAM HOST TARGET RNA, into VGAM221 host target protein, herein designated VGAM HOST TARGET PROTEIN. VGAM host target protein is therefore outlined by a broken line.

[3056] it is appreciated that VGAM221 host target gene, herein designated VGAM HOST TARGET GENE, in fact represents a plurality of VGAM221 host target genes. The mRNA of each one of this plurality of VGAM221 host target genes comprises one or more host target binding sites, each having a nucleotide sequence which is at least partly complementary to VGAM221 RNA, herein designated VGAM RNA, and which when bound by VGAM221 RNA, herein designated VGAM RNA, causes inhibition of translation of respective one or more VGAM221 host target proteins.

[3057] It is further appreciated by one skilled in the art that the mode of translational inhibition illustrated by FIG. 1 with specific reference to translational inhibition exerted by VGAM221 gene, herein designated VGAM GENE, on one or more VGAM221 host target gene, herein designated VGAM HOST TARGET GENE, is in fact common to other known non-viral miRNA genes. As mentioned hereinabove with reference to the background section, although a specific complementary binding site has been demonstrated only for some of the known miRNA genes (primarily Lin-4 and Let-7), all other recently discovered miRNA genes are also believed by those skilled in the art to modulate expression of other genes by complementary binding, although specific complementary binding sites of these other miRNA genes have not yet been found (Ruvkun G., Perspective: Glimpses of a tiny RNA world, Science 294, 779 (2001)).

[3058] It is yet further appreciated that a function of VGAM221 is inhibition of expression of host target genes, as part of a novel viral mechanism of attacking a host. Accordingly, utilities of VGAM221 include diagnosis, prevention and treatment of viral infection by Vaccinia virus. Specific functions, and accordingly utilities, of VGAM221 correlate with, and may be deduced from, the identity of the host target genes which VGAM221 binds and inhibits, and the function of these host target genes, as elaborated hereinbelow.

[3059] Nucleotide sequences of the VGAM221 precursor RNA, herein designated VGAM PRECURSOR RNA, and of the diced VGAM221 RNA, herein designated VGAM RNA, and a schematic representation of the secondary folding of VGAM221 folded precursor RNA, herein designated VGAM FOLDED PRECURSOR RNA, of VGAM221 are further described hereinbelow with reference to Table 1.

[3060] Nucleotide sequences of host target binding sites, such as BINDING SITE-I, BINDING SITE-II and BINDING SITE-III of FIG. 1, found on, and schematic representation of the complementarity of each of these host target binding sites to VGAM221 RNA, herein designated VGAM RNA, are described hereinbelow with reference to Table 2.

[3061] FIG. 1 further provides a conceptual description of another novel bioinformatically detected viral gene of the present invention, referred to here as Viral Genomic Address Messenger 222 (VGAM222) viral gene, which modulates expression of respective host target genes thereof, the function and utility of which host target genes is known in the art.

[3062] VGAM222 is a novel bioinformatically detected regulatory, non protein coding, viral micro RNA (miRNA) gene. The method by which VGAM222 was detected is described hereinabove with reference to FIGS. 2-8.

[3063] VGAM222 gene, herein designated VGAM GENE, is a viral gene contained in the genome of Vaccinia virus. VGAM222 host target gene, herein designated VGAM HOST TARGET GENE, is a human gene contained in the human genome.

[3064] VGAM222 gene, herein designated VGAM GENE, encodes a VGAM222 precursor RNA, herein designated VGAM PRECURSOR RNA. Similar to other miRNA genes, and unlike most ordinary genes, VGAM222 precursor RNA, herein designated VGAM PRECURSOR RNA, does not encode a protein. A nucleotide sequence identical or highly similar to the nucleotide sequence of VGAM222 precursor RNA is designated SEQ ID:208, and is provided hereinbelow with reference to the sequence listing part. Nucleotide sequence SEQ ID:208 is located at position 117498 relative to the genome of Vaccinia virus.

[3065] VGAM222 precursor RNA, herein designated VGAM PRECURSOR RNA, folds onto itself, forming VGAM222 folded precursor RNA, herein designated VGAM FOLDED PRECURSOR RNA, which has a two-dimensional hairpin structure. As is well known in the art, this hairpin structure, is typical of RNA encoded by miRNA genes, and is due to the fact that the nucleotide sequence of the first half of the RNA encoded by a miRNA gene is an accurate or partial inversed-reversed sequence of the nucleotide sequence of the second half thereof.

[3066] An enzyme complex designated DICER COMPLEX, dices the VGAM222 folded precursor RNA, herein designated VGAM FOLDED PRECURSOR RNA, into VGAM222 RNA, herein designated VGAM RNA, a single stranded ˜22 nt long RNA segment. As is known in the art, dicing of a hairpin structured RNA precursor product into a short ˜22 nt RNA segment is catalyzed by an enzyme complex comprising an enzyme called Dicer together with other necessary proteins. A probable (over 89%) nucleotide sequence of VGAM222 RNA is designated SEQ ID:557, and is provided hereinbelow with reference to the sequence listing part.

[3067] VGAM222 host target gene, herein designated VGAM HOST TARGET GENE, encodes a corresponding messenger RNA, VGAM222 host target RNA, herein designated VGAM HOST TARGET RNA. VGAM222 host target RNA, herein designated VGAM HOST TARGET RNA, comprises three regions, as is typical of mRNA of a protein coding gene: a 5 untranslated region, a protein coding region and a 3 untranslated region, designated 5UTR, PROTEIN CODING and 3UTR respectively.

[3068] VGAM222 RNA, herein designated VGAM RNA, binds complementarily to one or more host target binding sites located in untranslated regions of VGAM222 host target RNA, herein designated VGAM HOST TARGET RNA. This complementary binding is due to the fact that the nucleotide sequence of VGAM222 RNA, herein designated VGAM RNA, is an accurate or a partial inversed-reversed sequence of the nucleotide sequence of each of the host target binding sites. As an illustration, FIG. 1 shows 3 such host target binding sites, designated BINDING SITE I, BINDING SITE II and BINDING SITE III respectively. It is appreciated that the number of host target binding sites shown in FIG. 1 is meant as an illustration only, and is not meant to be limiting VGAM222 RNA, herein designated VGAM RNA, may have a different number of host target binding sites in untranslated regions of a VGAM222 host target RNA, herein designated VGAM HOST TARGET RNA. It is further appreciated that while FIG. 1 depicts host target binding sites in the 3UTR region, this is meant as an example only these host target binding sites may be located in the 3UTR region, the 5UTR region, or in both 3UTR and 5UTR regions.

[3069] The complementary binding of VGAM222 RNA, herein designated VGAM RNA, to host target binding sites on VGAM222 host target RNA, herein designated VGAM HOST TARGET RNA, such as BINDING SITE I, BINDING SITE II and BINDING SITE III, inhibits translation of VGAM222 host target RNA, herein designated VGAM HOST TARGET RNA, into VGAM222 host target protein, herein designated VGAM HOST TARGET PROTEIN. VGAM host target protein is therefore outlined by a broken line.

[3070] It is appreciated that VGAM222 host target gene, herein designated VGAM HOST TARGET GENE, in fact represents a plurality of VGAM222 host target genes. The mRNA of each one of this plurality of VGAM222 host target genes comprises one or more host target binding sites, each having a nucleotide sequence which is at least partly complementary to VGAM222 RNA, herein designated VGAM RNA, and which when bound by VGAM222 RNA, herein designated VGAM RNA, causes inhibition of translation of respective one or more VGAM222 host target proteins.

[3071] It is further appreciated by one skilled in the art that the mode of translational inhibition illustrated by FIG. 1 with specific reference to translational inhibition exerted by VGAM222 gene, herein designated VGAM GENE, on one or more VGAM222 host target gene, herein designated VGAM HOST TARGET GENE, is in fact common to other known non-viral miRNA genes. As mentioned hereinabove with reference to the background section, although a specific complementary binding site has been demonstrated only for some of the known miRNA genes (primarily Lin-4 and Let-7), all other recently discovered miRNA genes are also believed by those skilled in the art to modulate expression of other genes by complementary binding, although specific complementary binding sites of these other miRNA genes have not yet been found (Ruvkun G., Perspective: Glimpses of a tiny RNA world, Science 294, 779 (2001)).

[3072] It is yet further appreciated that a function of VGAM222 is inhibition of expression of host target genes, as part of a novel viral mechanism of attacking a host. Accordingly, utilities of VGAM222 include diagnosis, prevention and treatment of viral infection by Vaccinia virus. Specific functions, and accordingly utilities, of VGAM222 correlate with, and may be deduced from, the identity of the host target genes which VGAM222 binds and inhibits, and the function of these host target genes, as elaborated hereinbelow.

[3073] Nucleotide sequences of the VGAM222 precursor RNA, herein designated VGAM PRECURSOR RNA, and of the diced VGAM222 RNA, herein designated VGAM RNA, and a schematic representation of the secondary folding of VGAM222 folded precursor RNA, herein designated VGAM FOLDED PRECURSOR RNA, of VGAM222 are further described hereinbelow with reference to Table 1.

[3074] Nucleotide sequences of host target binding sites, such as BINDING SITE-I, BINDING SITE-II and BINDING SITE-III of FIG. 1, found on, and schematic representation of the complementarity of each of these host target binding sites to VGAM222 RNA, herein designated VGAM RNA, are described hereinbelow with reference to Table 2.

[3075] FIG. 1 further provides a conceptual description of another novel bioinformatically detected viral gene of the present invention, referred to here as Viral Genomic Address Messenger 223 (VGAM223) viral gene, which modulates expression of respective host target genes thereof, the function and utility of which host target genes is known in the art.

[3076] VGAM223 is a novel bioinformatically detected regulatory, non protein coding, viral micro RNA (miRNA) gene. The method by which VGAM223 was detected is described hereinabove with reference to FIGS. 2-8.

[3077] VGAM223 gene, herein designated VGAM GENE, is a viral gene contained in the genome of Vaccinia virus. VGAM223 host target gene, herein designated VGAM HOST TARGET GENE, is a human gene contained in the human genome.

[3078] VGAM223 gene, herein designated VGAM GENE, encodes a VGAM223 precursor RNA, herein designated VGAM PRECURSOR RNA. Similar to other miRNA genes, and unlike most ordinary genes, VGAM223 precursor RNA, herein designated VGAM PRECURSOR RNA, does not encode a protein. A nucleotide sequence identical or highly similar to the nucleotide sequence of VGAM223 precursor RNA is designated SEQ ID:209, and is provided hereinbelow with reference to the sequence listing part. Nucleotide sequence SEQ ID:209 is located at position 117715 relative to the genome of Vaccinia virus.

[3079] VGAM223 precursor RNA, herein designated VGAM PRECURSOR RNA, folds onto itself, forming VGAM223 folded precursor RNA, herein designated VGAM FOLDED PRECURSOR RNA, which has a two-dimensional hairpin structure. As is well known in the art, this hairpin structure, is typical of RNA encoded by miRNA genes, and is due to the fact that the nucleotide sequence of the first half of the RNA encoded by a miRNA gene is an accurate or partial inversed-reversed sequence of the nucleotide sequence of the second half thereof.

[3080] An enzyme complex designated DICER COMPLEX, dices the VGAM223 folded precursor RNA, herein designated VGAM FOLDED PRECURSOR RNA, into VGAM223 RNA, herein designated VGAM RNA, a single stranded ˜22 nt long RNA segment. As is known in the art, dicing of a hairpin structured RNA precursor product into a short ˜22 nt RNA segment is catalyzed by an enzyme complex comprising an enzyme called Dicer together with other necessary proteins. A probable (over 87%) nucleotide sequence of VGAM223 RNA is designated SEQ ID:558, and is provided hereinbelow with reference to the sequence listing part.

[3081] VGAM223 host target gene, herein designated VGAM HOST TARGET GENE, encodes a corresponding messenger RNA, VGAM223 host target RNA, herein designated VGAM HOST TARGET RNA. VGAM223 host target RNA, herein designated VGAM HOST TARGET RNA, comprises three regions, as is typical of mRNA of a protein coding gene: a 5 untranslated region, a protein coding region and a 3 untranslated region, designated 5UTR, PROTEIN CODING and 3UTR respectively.

[3082] VGAM223 RNA, herein designated VGAM RNA, binds complementarily to one or more host target binding sites located in untranslated regions of VGAM223 host target RNA, herein designated VGAM HOST TARGET RNA. This complementary binding is due to the fact that the nucleotide sequence of VGAM223 RNA, herein designated VGAM RNA, is an accurate or a partial inversed-reversed sequence of the nucleotide sequence of each of the host target binding sites. As an illustration, FIG. 1 shows 3 such host target binding sites, designated BINDING SITE I, BINDING SITE II and BINDING SITE III respectively. It is appreciated that the number of host target binding sites shown in FIG. 1 is meant as an illustration only, and is not meant to be limiting VGAM223 RNA, herein designated VGAM RNA, may have a different number of host target binding sites in untranslated regions of a VGAM223 host target RNA, herein designated VGAM HOST TARGET RNA. It is further appreciated that while FIG. 1 depicts host target binding sites in the 3UTR region, this is meant as an example only these host target binding sites may be located in the 3UTR region, the 5UTR region, or in both 3UTR and 5UTR regions.

[3083] The complementary binding of VGAM223 RNA, herein designated VGAM RNA, to host target binding sites on VGAM223 host target RNA, herein designated VGAM HOST TARGET RNA, such as BINDING SITE I, BINDING SITE II and BINDING SITE III, inhibits translation of VGAM223 host target RNA, herein designated VGAM HOST TARGET RNA, into VGAM223 host target protein, herein designated VGAM HOST TARGET PROTEIN. VGAM host target protein is therefore outlined by a broken line.

[3084] It is appreciated that VGAM223 host target gene, herein designated VGAM HOST TARGET GENE, in fact represents a plurality of VGAM223 host target genes. The mRNA of each one of this plurality of VGAM223 host target genes comprises one or more host target binding sites, each having a nucleotide sequence which is at least partly complementary to VGAM223 RNA, herein designated VGAM RNA, and which when bound by VGAM223 RNA, herein designated VGAM RNA, causes inhibition of translation of respective one or more VGAM223 host target proteins.

[3085] It is further appreciated by one skilled in the art that the mode of translational inhibition illustrated by FIG. 1 with specific reference to translational inhibition exerted by VGAM223 gene, herein designated VGAM GENE, on one or more VGAM223 host target gene, herein designated VGAM HOST TARGET GENE, is in fact common to other known non-viral miRNA genes. As mentioned hereinabove with reference to the background section, although a specific complementary binding site has been demonstrated only for some of the known miRNA genes (primarily Lin-4 and Let-7), all other recently discovered miRNA genes are also believed by those skilled in the art to modulate expression of other genes by complementary binding, although specific complementary binding sites of these other miRNA genes have not yet been found (Ruvkun G., Perspective: Glimpses of a tiny RNA world, Science 294, 779 (2001)).

[3086] It is yet further appreciated that a function of VGAM223 is inhibition of expression of host target genes, as part of a novel viral mechanism of attacking a host. Accordingly, utilities of VGAM223 include diagnosis, prevention and treatment of viral infection by Vaccinia virus. Specific functions, and accordingly utilities, of VGAM223 correlate with, and may be deduced from, the identity of the host target genes which VGAM223 binds and inhibits, and the function of these host target genes, as elaborated hereinbelow.

[3087] Nucleotide sequences of the VGAM223 precursor RNA, herein designated VGAM PRECURSOR RNA, and of the diced VGAM223 RNA, herein designated VGAM RNA, and a schematic representation of the secondary folding of VGAM223 folded precursor RNA, herein designated VGAM FOLDED PRECURSOR RNA, of VGAM223 are further described hereinbelow with reference to Table 1.

[3088] Nucleotide sequences of host target binding sites, such as BINDING SITE-I, BINDING SITE-II and BINDING SITE-III of FIG. 1, found on, and schematic representation of the complementarity of each of these host target binding sites to VGAM223 RNA, herein designated VGAM RNA, are described hereinbelow with reference to Table 2.

[3089] FIG. 1 further provides a conceptual description of another novel bioinformatically detected viral gene of the present invention, referred to here as Viral Genomic Address Messenger 224 (VGAM224) viral gene, which modulates expression of respective host target genes thereof, the function and utility of which host target genes is known in the art.

[3090] VGAM224 is a novel bioinformatically detected regulatory, non protein coding, viral micro RNA (miRNA) gene. The method by which VGAM224 was detected is described hereinabove with reference to FIGS. 2-8.

[3091] VGAM224 gene, herein designated VGAM GENE, is a viral gene contained in the genome of Vaccinia virus. VGAM224 host target gene, herein designated VGAM HOST TARGET GENE, is a human gene contained in the human genome.

[3092] VGAM224 gene, herein designated VGAM GENE, encodes a VGAM224 precursor RNA, herein designated VGAM PRECURSOR RNA. Similar to other miRNA genes, and unlike most ordinary genes, VGAM224 precursor RNA, herein designated VGAM PRECURSOR RNA, does not encode a protein. A nucleotide sequence identical or highly similar to the nucleotide sequence of VGAM224 precursor RNA is designated SEQ ID:210, and is provided hereinbelow with reference to the sequence listing part. Nucleotide sequence SEQ ID:210 is located at position 119904 relative to the genome of Vaccinia virus.

[3093] VGAM224 precursor RNA, herein designated VGAM PRECURSOR RNA, folds onto itself, forming VGAM224 folded precursor RNA, herein designated VGAM FOLDED PRECURSOR RNA, which has a two-dimensional hairpin structure. As is well known in the art, this hairpin structure, is typical of RNA encoded by miRNA genes, and is due to the fact that the nucleotide sequence of the first half of the RNA encoded by a miRNA gene is an accurate or partial inversed-reversed sequence of the nucleotide sequence of the second half thereof.

[3094] An enzyme complex designated DICER COMPLEX, dices the VGAM224 folded precursor RNA, herein designated VGAM FOLDED PRECURSOR RNA, into VGAM224 RNA, herein designated VGAM RNA, a single stranded ˜22 nt long RNA segment. As is known in the art, dicing of a hairpin structured RNA precursor product into a short ˜22 nt RNA segment is catalyzed by an enzyme complex comprising an enzyme called Dicer together with other necessary proteins. A probable (over 81%) nucleotide sequence of VGAM224 RNA is designated SEQ ID:559, and is provided hereinbelow with reference to the sequence listing part.

[3095] VGAM224 host target gene, herein designated VGAM HOST TARGET GENE, encodes a corresponding messenger RNA, VGAM224 host target RNA, herein designated VGAM HOST TARGET RNA. VGAM224 host target RNA, herein designated VGAM HOST TARGET RNA, comprises three regions, as is typical of mRNA of a protein coding gene: a 5 untranslated region, a protein coding region and a 3 untranslated region, designated 5UTR, PROTEIN CODING and 3UTR respectively.

[3096] VGAM224 RNA, herein designated VGAM RNA, binds complementarily to one or more host target binding sites located in untranslated regions of VGAM224 host target RNA, herein designated VGAM HOST TARGET RNA. This complementary binding is due to the fact that the nucleotide sequence of VGAM224 RNA, herein designated VGAM RNA, is an accurate or a partial inversed-reversed sequence of the nucleotide sequence of each of the host target binding sites. As an illustration, FIG. 1 shows 3 such host target binding sites, designated BINDING SITE I, BINDING SITE II and BINDING SITE III respectively. It is appreciated that the number of host target binding sites shown in FIG. 1 is meant as an illustration only, and is not meant to be limiting VGAM224 RNA, herein designated VGAM RNA, may have a different number of host target binding sites in untranslated regions of a VGAM224 host target RNA, herein designated VGAM HOST TARGET RNA. It is further appreciated that while FIG. 1 depicts host target binding sites in the 3UTR region, this is meant as an example only these host target binding sites may be located in the 3UTR region, the 5UTR region, or in both 3UTR and 5UTR regions.

[3097] The complementary binding of VGAM224 RNA, herein designated VGAM RNA, to host target binding sites on VGAM224 host target RNA, herein designated VGAM HOST TARGET RNA, such as BINDING SITE I, BINDING SITE II and BINDING SITE III, inhibits translation of VGAM224 host target RNA, herein designated VGAM HOST TARGET RNA, into VGAM224 host target protein, herein designated VGAM HOST TARGET PROTEIN. VGAM host target protein is therefore outlined by a broken line.

[3098] It is appreciated that VGAM224 host target gene, herein designated VGAM HOST TARGET GENE, in fact represents a plurality of VGAM224 host target genes. The mRNA of each one of this plurality of VGAM224 host target genes comprises one or more host target binding sites, each having a nucleotide sequence which is at least partly complementary to VGAM224 RNA, herein designated VGAM RNA, and which when bound by VGAM224 RNA, herein designated VGAM RNA, causes inhibition of translation of respective one or more VGAM224 host target proteins.

[3099] It is further appreciated by one skilled in the art that the mode of translational inhibition illustrated by FIG. 1 with specific reference to translational inhibition exerted by VGAM224 gene, herein designated VGAM GENE, on one or more VGAM224 host target gene, herein designated VGAM HOST TARGET GENE, is in fact common to other known non-viral miRNA genes. As mentioned hereinabove with reference to the background section, although a specific complementary binding site has been demonstrated only for some of the known miRNA genes (primarily Lin-4 and Let-7), all other recently discovered miRNA genes are also believed by those skilled in the art to modulate expression of other genes by complementary binding, although specific complementary binding sites of these other miRNA genes have not yet been found (Ruvkun G., Perspective: Glimpses of a tiny RNA world, Science 294, 779 (2001)).

[3100] It is yet further appreciated that a function of VGAM224 is inhibition of expression of host target genes, as part of a novel viral mechanism of attacking a host. Accordingly, utilities of VGAM224 include diagnosis, prevention and treatment of viral infection by Vaccinia virus. Specific functions, and accordingly utilities, of VGAM224 correlate with, and may be deduced from, the identity of the host target genes which VGAM224 binds and inhibits, and the function of these host target genes, as elaborated hereinbelow.

[3101] Nucleotide sequences of the VGAM224 precursor RNA, herein designated VGAM PRECURSOR RNA, and of the diced VGAM224 RNA, herein designated VGAM RNA, and a schematic representation of the secondary folding of VGAM224 folded precursor RNA, herein designated VGAM FOLDED PRECURSOR RNA, of VGAM224 are further described hereinbelow with reference to Table 1.

[3102] Nucleotide sequences of host target binding sites, such as BINDING SITE-I, BINDING SITE-II and BINDING SITE-III of FIG. 1, found on, and schematic representation of the complementarity of each of these host target binding sites to VGAM224 RNA, herein designated VGAM RNA, are described hereinbelow with reference to Table 2.

[3103] FIG. 1 further provides a conceptual description of another novel bioinformatically detected viral gene of the present invention, referred to here as Viral Genomic Address Messenger 225 (VGAM225) viral gene, which modulates expression of respective host target genes thereof, the function and utility of which host target genes is known in the art.

[3104] VGAM225 is a novel bioinformatically detected regulatory, non protein coding, viral micro RNA (miRNA) gene. The method by which VGAM225 was detected is described hereinabove with reference to FIGS. 2-8.

[3105] VGAM225 gene, herein designated VGAM GENE, is a viral gene contained in the genome of Vaccinia virus. VGAM225 host target gene, herein designated VGAM HOST TARGET GENE, is a human gene contained in the human genome.

[3106] VGAM225 gene, herein designated VGAM GENE, encodes a VGAM225 precursor RNA, herein designated VGAM PRECURSOR RNA. Similar to other miRNA genes, and unlike most ordinary genes, VGAM225 precursor RNA, herein designated VGAM PRECURSOR RNA, does not encode a protein. A nucleotide sequence identical or highly similar to the nucleotide sequence of VGAM225 precursor RNA is designated SEQ ID:211, and is provided hereinbelow with reference to the sequence listing part. Nucleotide sequence SEQ ID:211 is located at position 118961 relative to the genome of Vaccinia virus.

[3107] VGAM225 precursor RNA, herein designated VGAM PRECURSOR RNA, folds onto itself, forming VGAM225 folded precursor RNA, herein designated VGAM FOLDED PRECURSOR RNA, which has a two-dimensional hairpin structure. As is well known in the art, this hairpin structure, is typical of RNA encoded by miRNA genes, and is due to the fact that the nucleotide sequence of the first half of the RNA encoded by a miRNA gene is an accurate or partial inversed-reversed sequence of the nucleotide sequence of the second half thereof.

[3108] An enzyme complex designated DICER COMPLEX, dices the VGAM225 folded precursor RNA, herein designated VGAM FOLDED PRECURSOR RNA, into VGAM225 RNA, herein designated VGAM RNA, a single stranded ˜22 nt long RNA segment. As is known in the art, dicing of a hairpin structured RNA precursor product into a short ˜22 nt RNA segment is catalyzed by an enzyme complex comprising an enzyme called Dicer together with other necessary proteins. A probable (over 86%) nucleotide sequence of VGAM225 RNA is designated SEQ ID:560, and is provided hereinbelow with reference to the sequence listing part.

[3109] VGAM225 host target gene, herein designated VGAM HOST TARGET GENE, encodes a corresponding messenger RNA, VGAM225 host target RNA, herein designated VGAM HOST TARGET RNA. VGAM225 host target RNA, herein designated VGAM HOST TARGET RNA, comprises three regions, as is typical of mRNA of a protein coding gene: a 5 untranslated region, a protein coding region and a 3 untranslated region, designated 5UTR, PROTEIN CODING and 3UTR respectively.

[3110] VGAM225 RNA, herein designated VGAM RNA, binds complementarily to one or more host target binding sites located in untranslated regions of VGAM225 host target RNA, herein designated VGAM HOST TARGET RNA. This complementary binding is due to the fact that the nucleotide sequence of VGAM225 RNA, herein designated VGAM RNA, is an accurate or a partial inversed-reversed sequence of the nucleotide sequence of each of the host target binding sites. As an illustration, FIG. 1 shows 3 such host target binding sites, designated BINDING SITE I, BINDING SITE II and BINDING SITE III respectively. It is appreciated that the number of host target binding sites shown in FIG. 1 is meant as an illustration only, and is not meant to be limiting VGAM225 RNA, herein designated VGAM RNA, may have a different number of host target binding sites in untranslated regions of a VGAM225 host target RNA, herein designated VGAM HOST TARGET RNA. It is further appreciated that while FIG. 1 depicts host target binding sites in the 3UTR region, this is meant as an example only these host target binding sites may be located in the 3UTR region, the 5UTR region, or in both 3UTR and 5UTR regions.

[3111] The complementary binding of VGAM225 RNA, herein designated VGAM RNA, to host target binding sites on VGAM225 host target RNA, herein designated VGAM HOST TARGET RNA, such as BINDING SITE I, BINDING SITE II and BINDING SITE III, inhibits translation of VGAM225 host target RNA, herein designated VGAM HOST TARGET RNA, into VGAM225 host target protein, herein designated VGAM HOST TARGET PROTEIN. VGAM host target protein is therefore outlined by a broken line.

[3112] It is appreciated that VGAM225 host target gene, herein designated VGAM HOST TARGET GENE, in fact represents a plurality of VGAM225 host target genes. The mRNA of each one of this plurality of VGAM225 host target genes comprises one or more host target binding sites, each having a nucleotide sequence which is at least partly complementary to VGAM225 RNA, herein designated VGAM RNA, and which when bound by VGAM225 RNA, herein designated VGAM RNA, causes inhibition of translation of respective one or more VGAM225 host target proteins.

[3113] It is further appreciated by one skilled in the art that the mode of translational inhibition illustrated by FIG. 1 with specific reference to translational inhibition exerted by VGAM225 gene, herein designated VGAM GENE, on one or more VGAM225 host target gene, herein designated VGAM HOST TARGET GENE, is in fact common to other known non-viral miRNA genes. As mentioned hereinabove with reference to the background section, although a specific complementary binding site has been demonstrated only for some of the known miRNA genes (primarily Lin-4 and Let-7), all other recently discovered miRNA genes are also believed by those skilled in the art to modulate expression of other genes by complementary binding, although specific complementary binding sites of these other miRNA genes have not yet been found (Ruvkun G., Perspective: Glimpses of a tiny RNA world, Science 294, 779 (2001)).

[3114] It is yet further appreciated that a function of VGAM225 is inhibition of expression of host target genes, as part of a novel viral mechanism of attacking a host. Accordingly, utilities of VGAM225 include diagnosis, prevention and treatment of viral infection by Vaccinia virus. Specific functions, and accordingly utilities, of VGAM225 correlate with, and may be deduced from, the identity of the host target genes which VGAM225 binds and inhibits, and the function of these host target genes, as elaborated hereinbelow.

[3115] Nucleotide sequences of the VGAM225 precursor RNA, herein designated VGAM PRECURSOR RNA, and of the diced VGAM225 RNA, herein designated VGAM RNA, and a schematic representation of the secondary folding of VGAM225 folded precursor RNA, herein designated VGAM FOLDED PRECURSOR RNA, of VGAM225 are further described hereinbelow with reference to Table 1.

[3116] Nucleotide sequences of host target binding sites, such as BINDING SITE-I, BINDING SITE-II and BINDING SITE-III of FIG. 1, found on, and schematic representation of the complementarity of each of these host target binding sites to VGAM225 RNA, herein designated VGAM RNA, are described hereinbelow with reference to Table 2.

[3117] FIG. 1 further provides a conceptual description of another novel bioinformatically detected viral gene of the present invention, referred to here as Viral Genomic Address Messenger 226 (VGAM226) viral gene, which modulates expression of respective host target genes thereof, the function and utility of which host target genes is known in the art.

[3118] VGAM226 is a novel bioinformatically detected regulatory, non protein coding, viral micro RNA (miRNA) gene. The method by which VGAM226 was detected is described hereinabove with reference to FIGS. 2-8.

[3119] VGAM226 gene, herein designated VGAM GENE, is a viral gene contained in the genome of Vaccinia virus. VGAM226 host target gene, herein designated VGAM HOST TARGET GENE, is a human gene contained in the human genome.

[3120] VGAM226 gene, herein designated VGAM GENE, encodes a VGAM226 precursor RNA, herein designated VGAM PRECURSOR RNA. Similar to other miRNA genes, and unlike most ordinary genes, VGAM226 precursor RNA, herein designated VGAM PRECURSOR RNA, does not encode a protein. A nucleotide sequence identical or highly similar to the nucleotide sequence of VGAM226 precursor RNA is designated SEQ ID:212, and is provided hereinbelow with reference to the sequence listing part. Nucleotide sequence SEQ ID:212 is located at position 118120 relative to the genome of Vaccinia virus.

[3121] VGAM226 precursor RNA, herein designated VGAM PRECURSOR RNA, folds onto itself, forming VGAM226 folded precursor RNA, herein designated VGAM FOLDED PRECURSOR RNA, which has a two-dimensional hairpin structure. As is well known in the art, this hairpin structure, is typical of RNA encoded by miRNA genes, and is due to the fact that the nucleotide sequence of the first half of the RNA encoded by a miRNA gene is an accurate or partial inversed-reversed sequence of the nucleotide sequence of the second half thereof.

[3122] An enzyme complex designated DICER COMPLEX, dices the VGAM226 folded precursor RNA, herein designated VGAM FOLDED PRECURSOR RNA, into VGAM226 RNA, herein designated VGAM RNA, a single stranded ˜22 nt long RNA segment. As is known in the art, dicing of a hairpin structured RNA precursor product into a short ˜22 nt RNA segment is catalyzed by an enzyme complex comprising an enzyme called Dicer together with other necessary proteins. A probable (over 74%) nucleotide sequence of VGAM226 RNA is designated SEQ ID:561, and is provided hereinbelow with reference to the sequence listing part.

[3123] VGAM226 host target gene, herein designated VGAM HOST TARGET GENE, encodes a corresponding messenger RNA, VGAM226 host target RNA, herein designated VGAM HOST TARGET RNA. VGAM226 host target RNA, herein designated VGAM HOST TARGET RNA, comprises three regions, as is typical of mRNA of a protein coding gene: a 5 untranslated region, a protein coding region and a 3 untranslated region, designated 5UTR, PROTEIN CODING and 3UTR respectively.

[3124] VGAM226 RNA, herein designated VGAM RNA, binds complementarily to one or more host target binding sites located in untranslated regions of VGAM226 host target RNA, herein designated VGAM HOST TARGET RNA. This complementary binding is due to the fact that the nucleotide sequence of VGAM226 RNA, herein designated VGAM RNA, is an accurate or a partial inversed-reversed sequence of the nucleotide sequence of each of the host target binding sites. As an illustration, FIG. 1 shows 3 such host target binding sites, designated BINDING SITE I, BINDING SITE II and BINDING SITE III respectively. It is appreciated that the number of host target binding sites shown in FIG. 1 is meant as an illustration only, and is not meant to be limiting VGAM226 RNA, herein designated VGAM RNA, may have a different number of host target binding sites in untranslated regions of a VGAM226 host target RNA, herein designated VGAM HOST TARGET RNA. It is further appreciated that while FIG. 1 depicts host target binding sites in the 3UTR region, this is meant as an example only these host target binding sites may be located in the 3UTR region, the 5UTR region, or in both 3UTR and 5UTR regions.

[3125] The complementary binding of VGAM226 RNA, herein designated VGAM RNA, to host target binding sites on VGAM226 host target RNA, herein designated VGAM HOST TARGET RNA, such as BINDING SITE I, BINDING SITE II and BINDING SITE III, inhibits translation of VGAM226 host target RNA, herein designated VGAM HOST TARGET RNA, into VGAM226 host target protein, herein designated VGAM HOST TARGET PROTEIN. VGAM host target protein is therefore outlined by a broken line.

[3126] It is appreciated that VGAM226 host target gene, herein designated VGAM HOST TARGET GENE, in fact represents a plurality of VGAM226 host target genes. The mRNA of each one of this plurality of VGAM226 host target genes comprises one or more host target binding sites, each having a nucleotide sequence which is at least partly complementary to VGAM226 RNA, herein designated VGAM RNA, and which when bound by VGAM226 RNA, herein designated VGAM RNA, causes inhibition of translation of respective one or more VGAM226 host target proteins.

[3127] It is further appreciated by one skilled in the art that the mode of translational inhibition illustrated by FIG. 1 with specific reference to translational inhibition exerted by VGAM226 gene, herein designated VGAM GENE, on one or more VGAM226 host target gene, herein designated VGAM HOST TARGET GENE, is in fact common to other known non-viral miRNA genes. As mentioned hereinabove with reference to the background section, although a specific complementary binding site has been demonstrated only for some of the known miRNA genes (primarily Lin-4 and Let-7), all other recently discovered miRNA genes are also believed by those skilled in the art to modulate expression of other genes by complementary binding, although specific complementary binding sites of these other miRNA genes have not yet been found (Ruvkun G., Perspective: Glimpses of a tiny RNA world, Science 294, 779 (2001)).

[3128] It is yet further appreciated that a function of VGAM226 is inhibition of expression of host target genes, as part of a novel viral mechanism of attacking a host. Accordingly, utilities of VGAM226 include diagnosis, prevention and treatment of viral infection by Vaccinia virus. Specific functions, and accordingly utilities, of VGAM226 correlate with, and may be deduced from, the identity of the host target genes which VGAM226 binds and inhibits, and the function of these host target genes, as elaborated hereinbelow.

[3129] Nucleotide sequences of the VGAM226 precursor RNA, herein designated VGAM PRECURSOR RNA, and of the diced VGAM226 RNA, herein designated VGAM RNA, and a schematic representation of the secondary folding of VGAM226 folded precursor RNA, herein designated VGAM FOLDED PRECURSOR RNA, of VGAM226 are further described hereinbelow with reference to Table 1.

[3130] Nucleotide sequences of host target binding sites, such as BINDING SITE-I, BINDING SITE-II and BINDING SITE-III of FIG. 1, found on, and schematic representation of the complementarity of each of these host target binding sites to VGAM226 RNA, herein designated VGAM RNA, are described hereinbelow with reference to Table 2.

[3131] FIG. 1 further provides a conceptual description of another novel bioinformatically detected viral gene of the present invention, referred to here as Viral Genomic Address Messenger 227 (VGAM227) viral gene, which modulates expression of respective host target genes thereof, the function and utility of which host target genes is known in the art.

[3132] VGAM227 is a novel bioinformatically detected regulatory, non protein coding, viral micro RNA (miRNA) gene. The method by which VGAM227 was detected is described hereinabove with reference to FIGS. 2-8.

[3133] VGAM227 gene, herein designated VGAM GENE, is a viral gene contained in the genome of Vaccinia virus. VGAM227 host target gene, herein designated VGAM HOST TARGET GENE, is a human gene contained in the human genome.

[3134] VGAM227 gene, herein designated VGAM GENE, encodes a VGAM227 precursor RNA, herein designated VGAM PRECURSOR RNA. Similar to other miRNA genes, and unlike most ordinary genes, VGAM227 precursor RNA, herein designated VGAM PRECURSOR RNA, does not encode a protein. A nucleotide sequence identical or highly similar to the nucleotide sequence of VGAM227 precursor RNA is designated SEQ ID:213, and is provided hereinbelow with reference to the sequence listing part. Nucleotide sequence SEQ ID:213 is located at position 118560 relative to the genome of Vaccinia virus.

[3135] VGAM227 precursor RNA, herein designated VGAM PRECURSOR RNA, folds onto itself, forming VGAM227 folded precursor RNA, herein designated VGAM FOLDED PRECURSOR RNA, which has a two-dimensional hairpin structure. As is well known in the art, this hairpin structure, is typical of RNA encoded by miRNA genes, and is due to the fact that the nucleotide sequence of the first half of the RNA encoded by a miRNA gene is an accurate or partial inversed-reversed sequence of the nucleotide sequence of the second half thereof.

[3136] An enzyme complex designated DICER COMPLEX, dices the VGAM227 folded precursor RNA, herein designated VGAM FOLDED PRECURSOR RNA, into VGAM227 RNA, herein designated VGAM RNA, a single stranded ˜22 nt long RNA segment. As is known in the art, dicing of a hairpin structured RNA precursor product into a short ˜22 nt RNA segment is catalyzed by an enzyme complex comprising an enzyme called Dicer together with other necessary proteins. A probable (over 73%) nucleotide sequence of VGAM227 RNA is designated SEQ ID:562, and is provided hereinbelow with reference to the sequence listing part.

[3137] VGAM227 host target gene, herein designated VGAM HOST TARGET GENE, encodes a corresponding messenger RNA, VGAM227 host target RNA, herein designated VGAM HOST TARGET RNA. VGAM227 host target RNA, herein designated VGAM HOST TARGET RNA, comprises three regions, as is typical of mRNA of a protein coding gene: a 5 untranslated region, a protein coding region and a 3 untranslated region, designated 5UTR, PROTEIN CODING and 3UTR respectively.

[3138] VGAM227 RNA, herein designated VGAM RNA, binds complementarily to one or more host target binding sites located in untranslated regions of VGAM227 host target RNA, herein designated VGAM HOST TARGET RNA. This complementary binding is due to the fact that the nucleotide sequence of VGAM227 RNA, herein designated VGAM RNA, is an accurate or a partial inversed-reversed sequence of the nucleotide sequence of each of the host target binding sites. As an illustration, FIG. 1 shows 3 such host target binding sites, designated BINDING SITE I, BINDING SITE II and BINDING SITE III respectively. It is appreciated that the number of host target binding sites shown in FIG. 1 is meant as an illustration only, and is not meant to be limiting VGAM227 RNA, herein designated VGAM RNA, may have a different number of host target binding sites in untranslated regions of a VGAM227 host target RNA, herein designated VGAM HOST TARGET RNA. It is further appreciated that while FIG. 1 depicts host target binding sites in the 3UTR region, this is meant as an example only these host target binding sites may be located in the 3UTR region, the 5UTR region, or in both 3UTR and 5UTR regions.

[3139] The complementary binding of VGAM227 RNA, herein designated VGAM RNA, to host target binding sites on VGAM227 host target RNA, herein designated VGAM HOST TARGET RNA, such as BINDING SITE I, BINDING SITE II and BINDING SITE III, inhibits translation of VGAM227 host target RNA, herein designated VGAM HOST TARGET RNA, into VGAM227 host target protein, herein designated VGAM HOST TARGET PROTEIN. VGAM host target protein is therefore outlined by a broken line.

[3140] It is appreciated that VGAM227 host target gene, herein designated VGAM HOST TARGET GENE, in fact represents a plurality of VGAM227 host target genes. The mRNA of each one of this plurality of VGAM227 host target genes comprises one or more host target binding sites, each having a nucleotide sequence which is at least partly complementary to VGAM227 RNA, herein designated VGAM RNA, and which when bound by VGAM227 RNA, herein designated VGAM RNA, causes inhibition of translation of respective one or more VGAM227 host target proteins.

[3141] It is further appreciated by one skilled in the art that the mode of translational inhibition illustrated by FIG. 1 with specific reference to translational inhibition exerted by VGAM227 gene, herein designated VGAM GENE, on one or more VGAM227 host target gene, herein designated VGAM HOST TARGET GENE, is in fact common to other known non-viral miRNA genes. As mentioned hereinabove with reference to the background section, although a specific complementary binding site has been demonstrated only for some of the known miRNA genes (primarily Lin-4 and Let-7), all other recently discovered miRNA genes are also believed by those skilled in the art to modulate expression of other genes by complementary binding, although specific complementary binding sites of these other miRNA genes have not yet been found (Ruvkun G., Perspective: Glimpses of a tiny RNA world, Science 294, 779 (2001)).

[3142] It is yet further appreciated that a function of VGAM227 is inhibition of expression of host target genes, as part of a novel viral mechanism of attacking a host. Accordingly, utilities of VGAM227 include diagnosis, prevention and treatment of viral infection by Vaccinia virus. Specific functions, and accordingly utilities, of VGAM227 correlate with, and may be deduced from, the identity of the host target genes which VGAM227 binds and inhibits, and the function of these host target genes, as elaborated hereinbelow.

[3143] Nucleotide sequences of the VGAM227 precursor RNA, herein designated VGAM PRECURSOR RNA, and of the diced VGAM227 RNA, herein designated VGAM RNA, and a schematic representation of the secondary folding of VGAM227 folded precursor RNA, herein designated VGAM FOLDED PRECURSOR RNA, of VGAM227 are further described hereinbelow with reference to Table 1.

[3144] Nucleotide sequences of host target binding sites, such as BINDING SITE-I, BINDING SITE-II and BINDING SITE-III of FIG. 1, found on, and schematic representation of the complementarity of each of these host target binding sites to VGAM227 RNA, herein designated VGAM RNA, are described hereinbelow with reference to Table 2.

[3145] FIG. 1 further provides a conceptual description of another novel bioinformatically detected viral gene of the present invention, referred to here as Viral Genomic Address Messenger 228 (VGAM228) viral gene, which modulates expression of respective host target genes thereof, the function and utility of which host target genes is known in the art.

[3146] VGAM228 is a novel bioinformatically detected regulatory, non protein coding, viral micro RNA (miRNA) gene. The method by which VGAM228 was detected is described hereinabove with reference to FIGS. 2-8.

[3147] VGAM228 gene, herein designated VGAM GENE, is a viral gene contained in the genome of Vaccinia virus. VGAM228 host target gene, herein designated VGAM HOST TARGET GENE, is a human gene contained in the human genome.

[3148] VGAM228 gene, herein designated VGAM GENE, encodes a VGAM228 precursor RNA, herein designated VGAM PRECURSOR RNA. Similar to other miRNA genes, and unlike most ordinary genes, VGAM228 precursor RNA, herein designated VGAM PRECURSOR RNA, does not encode a protein. A nucleotide sequence identical or highly similar to the nucleotide sequence of VGAM228 precursor RNA is designated SEQ ID:214, and is provided hereinbelow with reference to the sequence listing part. Nucleotide sequence SEQ ID:214 is located at position 120881 relative to the genome of Vaccinia virus.

[3149] VGAM228 precursor RNA, herein designated VGAM PRECURSOR RNA, folds onto itself, forming VGAM228 folded precursor RNA, herein designated VGAM FOLDED PRECURSOR RNA, which has a two-dimensional hairpin structure. As is well known in the art, this hairpin structure, is typical of RNA encoded by miRNA genes, and is due to the fact that the nucleotide sequence of the first half of the RNA encoded by a miRNA gene is an accurate or partial inversed-reversed sequence of the nucleotide sequence of the second half thereof.

[3150] An enzyme complex designated DICER COMPLEX, dices the VGAM228 folded precursor RNA, herein designated VGAM FOLDED PRECURSOR RNA, into VGAM228 RNA, herein designated VGAM RNA, a single stranded ˜22 nt long RNA segment. As is known in the art, dicing of a hairpin structured RNA precursor product into a short ˜22 nt RNA segment is catalyzed by an enzyme complex comprising an enzyme called Dicer together with other necessary proteins. A probable (over 73%) nucleotide sequence of VGAM228 RNA is designated SEQ ID:563, and is provided hereinbelow with reference to the sequence listing part.

[3151] VGAM228 host target gene, herein designated VGAM HOST TARGET GENE, encodes a corresponding messenger RNA, VGAM228 host target RNA, herein designated VGAM HOST TARGET RNA. VGAM228 host target RNA, herein designated VGAM HOST TARGET RNA, comprises three regions, as is typical of mRNA of a protein coding gene: a 5 untranslated region, a protein coding region and a 3 untranslated region, designated 5UTR, PROTEIN CODING and 3UTR respectively.

[3152] VGAM228 RNA, herein designated VGAM RNA, binds complementarily to one or more host target binding sites located in untranslated regions of VGAM228 host target RNA, herein designated VGAM HOST TARGET RNA. This complementary binding is due to the fact that the nucleotide sequence of VGAM228 RNA, herein designated VGAM RNA, is an accurate or a partial inversed-reversed sequence of the nucleotide sequence of each of the host target binding sites. As an illustration, FIG. 1 shows 3 such host target binding sites, designated BINDING SITE I, BINDING SITE II and BINDING SITE III respectively. It is appreciated that the number of host target binding sites shown in FIG. 1 is meant as an illustration only, and is not meant to be limiting VGAM228 RNA, herein designated VGAM RNA, may have a different number of host target binding sites in untranslated regions of a VGAM228 host target RNA, herein designated VGAM HOST TARGET RNA. It is further appreciated that while FIG. 1 depicts host target binding sites in the 3UTR region, this is meant as an example only these host target binding sites may be located in the 3UTR region, the 5UTR region, or in both 3UTR and 5UTR regions.

[3153] The complementary binding of VGAM228 RNA, herein designated VGAM RNA, to host target binding sites on VGAM228 host target RNA, herein designated VGAM HOST TARGET RNA, such as BINDING SITE I, BINDING SITE II and BINDING SITE III, inhibits translation of VGAM228 host target RNA, herein designated VGAM HOST TARGET RNA, into VGAM228 host target protein, herein designated VGAM HOST TARGET PROTEIN. VGAM host target protein is therefore outlined by a broken line.

[3154] It is appreciated that VGAM228 host target gene, herein designated VGAM HOST TARGET GENE, in fact represents a plurality of VGAM228 host target genes. The mRNA of each one of this plurality of VGAM228 host target genes comprises one or more host target binding sites, each having a nucleotide sequence which is at least partly complementary to VGAM228 RNA, herein designated VGAM RNA, and which when bound by VGAM228 RNA, herein designated VGAM RNA, causes inhibition of translation of respective one or more VGAM228 host target proteins.

[3155] It is further appreciated by one skilled in the art that the mode of translational inhibition illustrated by FIG. 1 with specific reference to translational inhibition exerted by VGAM228 gene, herein designated VGAM GENE, on one or more VGAM228 host target gene, herein designated VGAM HOST TARGET GENE, is in fact common to other known non-viral miRNA genes. As mentioned hereinabove with reference to the background section, although a specific complementary binding site has been demonstrated only for some of the known miRNA genes (primarily Lin-4 and Let-7), all other recently discovered miRNA genes are also believed by those skilled in the art to modulate expression of other genes by complementary binding, although specific complementary binding sites of these other miRNA genes have not yet been found (Ruvkun G., Perspective: Glimpses of a tiny RNA world, Science 294, 779 (2001)).

[3156] It is yet further appreciated that a function of VGAM228 is inhibition of expression of host target genes, as part of a novel viral mechanism of attacking a host. Accordingly, utilities of VGAM228 include diagnosis, prevention and treatment of viral infection by Vaccinia virus. Specific functions, and accordingly utilities, of VGAM228 correlate with, and may be deduced from, the identity of the host target genes which VGAM228 binds and inhibits, and the function of these host target genes, as elaborated hereinbelow.

[3157] Nucleotide sequences of the VGAM228 precursor RNA, herein designated VGAM PRECURSOR RNA, and of the diced VGAM228 RNA, herein designated VGAM RNA, and a schematic representation of the secondary folding of VGAM228 folded precursor RNA, herein designated VGAM FOLDED PRECURSOR RNA, of VGAM228 are further described hereinbelow with reference to Table 1.

[3158] Nucleotide sequences of host target binding sites, such as BINDING SITE-I, BINDING SITE-II and BINDING SITE-III of FIG. 1, found on, and schematic representation of the complementarity of each of these host target binding sites to VGAM228 RNA, herein designated VGAM RNA, are described hereinbelow with reference to Table 2.

[3159] FIG. 1 further provides a conceptual description of another novel bioinformatically detected viral gene of the present invention, referred to here as Viral Genomic Address Messenger 229 (VGAM229) viral gene, which modulates expression of respective host target genes thereof, the function and utility of which host target genes is known in the art.

[3160] VGAM229 is a novel bioinformatically detected regulatory, non protein coding, viral micro RNA (miRNA) gene. The method by which VGAM229 was detected is described hereinabove with reference to FIGS. 2-8.

[3161] VGAM229 gene, herein designated VGAM GENE, is a viral gene contained in the genome of Vaccinia virus. VGAM229 host target gene, herein designated VGAM HOST TARGET GENE, is a human gene contained in the human genome.

[3162] VGAM229 gene, herein designated VGAM GENE, encodes a VGAM229 precursor RNA, herein designated VGAM PRECURSOR RNA. Similar to other miRNA genes, and unlike most ordinary genes, VGAM229 precursor RNA, herein designated VGAM PRECURSOR RNA, does not encode a protein. A nucleotide sequence identical or highly similar to the nucleotide sequence of VGAM229 precursor RNA is designated SEQ ID:215, and is provided hereinbelow with reference to the sequence listing part. Nucleotide sequence SEQ ID:215 is located at position 122419 relative to the genome of Vaccinia virus.

[3163] VGAM229 precursor RNA, herein designated VGAM PRECURSOR RNA, folds onto itself, forming VGAM229 folded precursor RNA, herein designated VGAM FOLDED PRECURSOR RNA, which has a two-dimensional hairpin structure. As is well known in the art, this hairpin structure, is typical of RNA encoded by miRNA genes, and is due to the fact that the nucleotide sequence of the first half of the RNA encoded by a miRNA gene is an accurate or partial inversed-reversed sequence of the nucleotide sequence of the second half thereof.

[3164] An enzyme complex designated DICER COMPLEX, dices the VGAM229 folded precursor RNA, herein designated VGAM FOLDED PRECURSOR RNA, into VGAM229 RNA, herein designated VGAM RNA, a single stranded ˜22 nt long RNA segment. As is known in the art, dicing of a hairpin structured RNA precursor product into a short ˜22 nt RNA segment is catalyzed by an enzyme complex comprising an enzyme called Dicer together with other necessary proteins. A probable (over 90%) nucleotide sequence of VGAM229 RNA is designated SEQ ID:564, and is provided hereinbelow with reference to the sequence listing part.

[3165] VGAM229 host target gene, herein designated VGAM HOST TARGET GENE, encodes a corresponding messenger RNA, VGAM229 host target RNA, herein designated VGAM HOST TARGET RNA. VGAM229 host target RNA, herein designated VGAM HOST TARGET RNA, comprises three regions, as is typical of mRNA of a protein coding gene: a 5 untranslated region, a protein coding region and a 3 untranslated region, designated 5UTR, PROTEIN CODING and 3UTR respectively.

[3166] VGAM229 RNA, herein designated VGAM RNA, binds complementarily to one or more host target binding sites located in untranslated regions of VGAM229 host target RNA, herein designated VGAM HOST TARGET RNA. This complementary binding is due to the fact that the nucleotide sequence of VGAM229 RNA, herein designated VGAM RNA, is an accurate or a partial inversed-reversed sequence of the nucleotide sequence of each of the host target binding sites. As an illustration, FIG. 1 shows 3 such host target binding sites, designated BINDING SITE I, BINDING SITE II and BINDING SITE III respectively. It is appreciated that the number of host target binding sites shown in FIG. 1 is meant as an illustration only, and is not meant to be limiting VGAM229 RNA, herein designated VGAM RNA, may have a different number of host target binding sites in untranslated regions of a VGAM229 host target RNA, herein designated VGAM HOST TARGET RNA. It is further appreciated that while FIG. 1 depicts host target binding sites in the 3UTR region, this is meant as an example only these host target binding sites may be located in the 3UTR region, the 5UTR region, or in both 3UTR and 5UTR regions.

[3167] The complementary binding of VGAM229 RNA, herein designated VGAM RNA, to host target binding sites on VGAM229 host target RNA, herein designated VGAM HOST TARGET RNA, such as BINDING SITE I, BINDING SITE II and BINDING SITE III, inhibits translation of VGAM229 host target RNA, herein designated VGAM HOST TARGET RNA, into VGAM229 host target protein, herein designated VGAM HOST TARGET PROTEIN. VGAM host target protein is therefore outlined by a broken line.

[3168] It is appreciated that VGAM229 host target gene, herein designated VGAM HOST TARGET GENE, in fact represents a plurality of VGAM229 host target genes. The mRNA of each one of this plurality of VGAM229 host target genes comprises one or more host target binding sites, each having a nucleotide sequence which is at least partly complementary to VGAM229 RNA, herein designated VGAM RNA, and which when bound by VGAM229 RNA, herein designated VGAM RNA, causes inhibition of translation of respective one or more VGAM229 host target proteins.

[3169] It is further appreciated by one skilled in the art that the mode of translational inhibition illustrated by FIG. 1 with specific reference to translational inhibition exerted by VGAM229 gene, herein designated VGAM GENE, on one or more VGAM229 host target gene, herein designated VGAM HOST TARGET GENE, is in fact common to other known non-viral miRNA genes. As mentioned hereinabove with reference to the background section, although a specific complementary binding site has been demonstrated only for some of the known miRNA genes (primarily Lin-4 and Let-7), all other recently discovered miRNA genes are also believed by those skilled in the art to modulate expression of other genes by complementary binding, although specific complementary binding sites of these other miRNA genes have not yet been found (Ruvkun G., Perspective: Glimpses of a tiny RNA world, Science 294, 779 (2001)).

[3170] It is yet further appreciated that a function of VGAM229 is inhibition of expression of host target genes, as part of a novel viral mechanism of attacking a host. Accordingly, utilities of VGAM229 include diagnosis, prevention and treatment of viral infection by Vaccinia virus. Specific functions, and accordingly utilities, of VGAM229 correlate with, and may be deduced from, the identity of the host target genes which VGAM229 binds and inhibits, and the function of these host target genes, as elaborated hereinbelow.

[3171] Nucleotide sequences of the VGAM229 precursor RNA, herein designated VGAM PRECURSOR RNA, and of the diced VGAM229 RNA, herein designated VGAM RNA, and a schematic representation of the secondary folding of VGAM229 folded precursor RNA, herein designated VGAM FOLDED PRECURSOR RNA, of VGAM229 are further described hereinbelow with reference to Table 1.

[3172] Nucleotide sequences of host target binding sites, such as BINDING SITE-I, BINDING SITE-II and BINDING SITE-III of FIG. 1, found on, and schematic representation of the complementarity of each of these host target binding sites to VGAM229 RNA, herein designated VGAM RNA, are described hereinbelow with reference to Table 2.

[3173] FIG. 1 further provides a conceptual description of another novel bioinformatically detected viral gene of the present invention, referred to here as Viral Genomic Address Messenger 230 (VGAM230) viral gene, which modulates expression of respective host target genes thereof, the function and utility of which host target genes is known in the art.

[3174] VGAM230 is a novel bioinformatically detected regulatory, non protein coding, viral micro RNA (miRNA) gene. The method by which VGAM230 was detected is described hereinabove with reference to FIGS. 2-8.

[3175] VGAM230 gene, herein designated VGAM GENE, is a viral gene contained in the genome of Vaccinia virus. VGAM230 host target gene, herein designated VGAM HOST TARGET GENE, is a human gene contained in the human genome.

[3176] VGAM230 gene, herein designated VGAM GENE, encodes a VGAM230 precursor RNA, herein designated VGAM PRECURSOR RNA. Similar to other miRNA genes, and unlike most ordinary genes, VGAM230 precursor RNA, herein designated VGAM PRECURSOR RNA, does not encode a protein. A nucleotide sequence identical or highly similar to the nucleotide sequence of VGAM230 precursor RNA is designated SEQ ID:216, and is provided hereinbelow with reference to the sequence listing part. Nucleotide sequence SEQ ID:216 is located at position 125121 relative to the genome of Vaccinia virus.

[3177] VGAM230 precursor RNA, herein designated VGAM PRECURSOR RNA, folds onto itself, forming VGAM230 folded precursor RNA, herein designated VGAM FOLDED PRECURSOR RNA, which has a two-dimensional hairpin structure. As is well known in the art, this hairpin structure, is typical of RNA encoded by miRNA genes, and is due to the fact that the nucleotide sequence of the first half of the RNA encoded by a miRNA gene is an accurate or partial inversed-reversed sequence of the nucleotide sequence of the second half thereof.

[3178] An enzyme complex designated DICER COMPLEX, dices the VGAM230 folded precursor RNA, herein designated VGAM FOLDED PRECURSOR RNA, into VGAM230 RNA, herein designated VGAM RNA, a single stranded ˜22 nt long RNA segment. As is known in the art, dicing of a hairpin structured RNA precursor product into a short ˜22 nt RNA segment is catalyzed by an enzyme complex comprising an enzyme called Dicer together with other necessary proteins. A probable (over 78%) nucleotide sequence of VGAM230 RNA is designated SEQ ID:565, and is provided hereinbelow with reference to the sequence listing part.

[3179] VGAM230 host target gene, herein designated VGAM HOST TARGET GENE, encodes a corresponding messenger RNA, VGAM230 host target RNA, herein designated VGAM HOST TARGET RNA. VGAM230 host target RNA, herein designated VGAM HOST TARGET RNA, comprises three regions, as is typical of mRNA of a protein coding gene: a 5 untranslated region, a protein coding region and a 3 untranslated region, designated 5UTR, PROTEIN CODING and 3UTR respectively.

[3180] VGAM230 RNA, herein designated VGAM RNA, binds complementarily to one or more host target binding sites located in untranslated regions of VGAM230 host target RNA, herein designated VGAM HOST TARGET RNA. This complementary binding is due to the fact that the nucleotide sequence of VGAM230 RNA, herein designated VGAM RNA, is an accurate or a partial inversed-reversed sequence of the nucleotide sequence of each of the host target binding sites. As an illustration, FIG. 1 shows 3 such host target binding sites, designated BINDING SITE I, BINDING SITE II and BINDING SITE III respectively. It is appreciated that the number of host target binding sites shown in FIG. 1 is meant as an illustration only, and is not meant to be limiting VGAM230 RNA, herein designated VGAM RNA, may have a different number of host target binding sites in untranslated regions of a VGAM230 host target RNA, herein designated VGAM HOST TARGET RNA. It is further appreciated that while FIG. 1 depicts host target binding sites in the 3UTR region, this is meant as an example only these host target binding sites may be located in the 3UTR region, the 5UTR region, or in both 3UTR and 5UTR regions.

[3181] The complementary binding of VGAM230 RNA, herein designated VGAM RNA, to host target binding sites on VGAM230 host target RNA, herein designated VGAM HOST TARGET RNA, such as BINDING SITE I, BINDING SITE II and BINDING SITE III, inhibits translation of VGAM230 host target RNA, herein designated VGAM HOST TARGET RNA, into VGAM230 host target protein, herein designated VGAM HOST TARGET PROTEIN. VGAM host target protein is therefore outlined by a broken line.

[3182] It is appreciated that VGAM230 host target gene, herein designated VGAM HOST TARGET GENE, in fact represents a plurality of VGAM230 host target genes. The mRNA of each one of this plurality of VGAM230 host target genes comprises one or more host target binding sites, each having a nucleotide sequence which is at least partly complementary to VGAM230 RNA, herein designated VGAM RNA, and which when bound by VGAM230 RNA, herein designated VGAM RNA, causes inhibition of translation of respective one or more VGAM230 host target proteins.

[3183] It is further appreciated by one skilled in the art that the mode of translational inhibition illustrated by FIG. 1 with specific reference to translational inhibition exerted by VGAM230 gene, herein designated VGAM GENE, on one or more VGAM230 host target gene, herein designated VGAM HOST TARGET GENE, is in fact common to other known non-viral miRNA genes. As mentioned hereinabove with reference to the background section, although a specific complementary binding site has been demonstrated only for some of the known miRNA genes (primarily Lin-4 and Let-7), all other recently discovered miRNA genes are also believed by those skilled in the art to modulate expression of other genes by complementary binding, although specific complementary binding sites of these other miRNA genes have not yet been found (Ruvkun G., Perspective: Glimpses of a tiny RNA world, Science 294, 779 (2001)).

[3184] it is yet further appreciated that a function of VGAM230 is inhibition of expression of host target genes, as part of a novel viral mechanism of attacking a host. Accordingly, utilities of VGAM230 include diagnosis, prevention and treatment of viral infection by Vaccinia virus. Specific functions, and accordingly utilities, of VGAM230 correlate with, and may be deduced from, the identity of the host target genes which VGAM230 binds and inhibits, and the function of these host target genes, as elaborated hereinbelow.

[3185] Nucleotide sequences of the VGAM230 precursor RNA, herein designated VGAM PRECURSOR RNA, and of the diced VGAM230 RNA, herein designated VGAM RNA, and a schematic representation of the secondary folding of VGAM230 folded precursor RNA, herein designated VGAM FOLDED PRECURSOR RNA, of VGAM230 are further described hereinbelow with reference to Table 1.

[3186] Nucleotide sequences of host target binding sites, such as BINDING SITE-I, BINDING SITE-II and BINDING SITE-III of FIG. 1, found on, and schematic representation of the complementarity of each of these host target binding sites to VGAM230 RNA, herein designated VGAM RNA, are described hereinbelow with reference to Table 2.

[3187] FIG. 1 further provides a conceptual description of another novel bioinformatically detected viral gene of the present invention, referred to here as Viral Genomic Address Messenger 231 (VGAM231) viral gene, which modulates expression of respective host target genes thereof, the function and utility of which host target genes is known in the art.

[3188] VGAM231 is a novel bioinformatically detected regulatory, non protein coding, viral micro RNA (miRNA) gene. The method by which VGAM231 was detected is described hereinabove with reference to FIGS. 2-8.

[3189] VGAM231 gene, herein designated VGAM GENE, is a viral gene contained in the genome of Vaccinia virus. VGAM231 host target gene, herein designated VGAM HOST TARGET GENE, is a human gene contained in the human genome.

[3190] VGAM231 gene, herein designated VGAM GENE, encodes a VGAM231 precursor RNA, herein designated VGAM PRECURSOR RNA. Similar to other miRNA genes, and unlike most ordinary genes, VGAM231 precursor RNA, herein designated VGAM PRECURSOR RNA, does not encode a protein. A nucleotide sequence identical or highly similar to the nucleotide sequence of VGAM231 precursor RNA is designated SEQ ID:217, and is provided hereinbelow with reference to the sequence listing part. Nucleotide sequence SEQ ID:217 is located at position 125645 relative to the genome of Vaccinia virus.

[3191] VGAM231 precursor RNA, herein designated VGAM PRECURSOR RNA, folds onto itself, forming VGAM231 folded precursor RNA, herein designated VGAM FOLDED PRECURSOR RNA, which has a two-dimensional hairpin structure. As is well known in the art, this hairpin structure, is typical of RNA encoded by miRNA genes, and is due to the fact that the nucleotide sequence of the first half of the RNA encoded by a miRNA gene is an accurate or partial inversed-reversed sequence of the nucleotide sequence of the second half thereof.

[3192] An enzyme complex designated DICER COMPLEX, dices the VGAM231 folded precursor RNA, herein designated VGAM FOLDED PRECURSOR RNA, into VGAM231 RNA, herein designated VGAM RNA, a single stranded ˜22 nt long RNA segment. As is known in the art, dicing of a hairpin structured RNA precursor product into a short ˜22 nt RNA segment is catalyzed by an enzyme complex comprising an enzyme called Dicer together with other necessary proteins. A probable (over 87%) nucleotide sequence of VGAM231 RNA is designated SEQ ID:566, and is provided hereinbelow with reference to the sequence listing part.

[3193] VGAM231 host target gene, herein designated VGAM HOST TARGET GENE, encodes a corresponding messenger RNA, VGAM231 host target RNA, herein designated VGAM HOST TARGET RNA. VGAM231 host target RNA, herein designated VGAM HOST TARGET RNA, comprises three regions, as is typical of mRNA of a protein coding gene: a 5 untranslated region, a protein coding region and a 3 untranslated region, designated 5UTR, PROTEIN CODING and 3UTR respectively.

[3194] VGAM231 RNA, herein designated VGAM RNA, binds complementarily to one or more host target binding sites located in untranslated regions of VGAM231 host target RNA, herein designated VGAM HOST TARGET RNA. This complementary binding is due to the fact that the nucleotide sequence of VGAM231 RNA, herein designated VGAM RNA, is an accurate or a partial inversed-reversed sequence of the nucleotide sequence of each of the host target binding sites. As an illustration, FIG. 1 shows 3 such host target binding sites, designated BINDING SITE I, BINDING SITE II and BINDING SITE III respectively. It is appreciated that the number of host target binding sites shown in FIG. 1 is meant as an illustration only, and is not meant to be limiting VGAM231 RNA, herein designated VGAM RNA, may have a different number of host target binding sites in untranslated regions of a VGAM231 host target RNA, herein designated VGAM HOST TARGET RNA. It is further appreciated that while FIG. 1 depicts host target binding sites in the 3UTR region, this is meant as an example only these host target binding sites may be located in the 3UTR region, the 5UTR region, or in both 3UTR and 5UTR regions.

[3195] The complementary binding of VGAM231 RNA, herein designated VGAM RNA, to host target binding sites on VGAM231 host target RNA, herein designated VGAM HOST TARGET RNA, such as BINDING SITE I, BINDING SITE II and BINDING SITE III, inhibits translation of VGAM231 host target RNA, herein designated VGAM HOST TARGET RNA, into VGAM231 host target protein, herein designated VGAM HOST TARGET PROTEIN. VGAM host target protein is therefore outlined by a broken line.

[3196] It is appreciated that VGAM231 host target gene, herein designated VGAM HOST TARGET GENE, in fact represents a plurality of VGAM231 host target genes. The mRNA of each one of this plurality of VGAM231 host target genes comprises one or more host target binding sites, each having a nucleotide sequence which is at least partly complementary to VGAM231 RNA, herein designated VGAM RNA, and which when bound by VGAM231 RNA, herein designated VGAM RNA, causes inhibition of translation of respective one or more VGAM231 host target proteins.

[3197] It is further appreciated by one skilled in the art that the mode of translational inhibition illustrated by FIG. 1 with specific reference to translational inhibition exerted by VGAM231 gene, herein designated VGAM GENE, on one or more VGAM231 host target gene, herein designated VGAM HOST TARGET GENE, is in fact common to other known non-viral miRNA genes. As mentioned hereinabove with reference to the background section, although a specific complementary binding site has been demonstrated only for some of the known miRNA genes (primarily Lin-4 and Let-7), all other recently discovered miRNA genes are also believed by those skilled in the art to modulate expression of other genes by complementary binding, although specific complementary binding sites of these other miRNA genes have not yet been found (Ruvkun G., Perspective: Glimpses of a tiny RNA world, Science 294, 779 (2001)).

[3198] It is yet further appreciated that a function of VGAM231 is inhibition of expression of host target genes, as part of a novel viral mechanism of attacking a host. Accordingly, utilities of VGAM231 include diagnosis, prevention and treatment of viral infection by Vaccinia virus. Specific functions, and accordingly utilities, of VGAM231 correlate with, and may be deduced from, the identity of the host target genes which VGAM231 binds and inhibits, and the function of these host target genes, as elaborated hereinbelow.

[3199] Nucleotide sequences of the VGAM231 precursor RNA, herein designated VGAM PRECURSOR RNA, and of the diced VGAM231 RNA, herein designated VGAM RNA, and a schematic representation of the secondary folding of VGAM231 folded precursor RNA, herein designated VGAM FOLDED PRECURSOR RNA, of VGAM231 are further described hereinbelow with reference to Table 1.

[3200] Nucleotide sequences of host target binding sites, such as BINDING SITE-I, BINDING SITE-II and BINDING SITE-III of FIG. 1, found on, and schematic representation of the complementarity of each of these host target binding sites to VGAM231 RNA, herein designated VGAM RNA, are described hereinbelow with reference to Table 2.

[3201] FIG. 1 further provides a conceptual description of another novel bioinformatically detected viral gene of the present invention, referred to here as Viral Genomic Address Messenger 232 (VGAM232) viral gene, which modulates expression of respective host target genes thereof, the function and utility of which host target genes is known in the art.

[3202] VGAM232 is a novel bioinformatically detected regulatory, non protein coding, viral micro RNA (miRNA) gene. The method by which VGAM232 was detected is described hereinabove with reference to FIGS. 2-8.

[3203] VGAM232 gene, herein designated VGAM GENE, is a viral gene contained in the genome of Vaccinia virus. VGAM232 host target gene, herein designated VGAM HOST TARGET GENE, is a human gene contained in the human genome.

[3204] VGAM232 gene, herein designated VGAM GENE, encodes a VGAM232 precursor RNA, herein designated VGAM PRECURSOR RNA. Similar to other miRNA genes, and unlike most ordinary genes, VGAM232 precursor RNA, herein designated VGAM PRECURSOR RNA, does not encode a protein. A nucleotide sequence identical or highly similar to the nucleotide sequence of VGAM232 precursor RNA is designated SEQ ID:218, and is provided hereinbelow with reference to the sequence listing part. Nucleotide sequence SEQ ID:218 is located at position 125237 relative to the genome of Vaccinia virus.

[3205] VGAM232 precursor RNA, herein designated VGAM PRECURSOR RNA, folds onto itself, forming VGAM232 folded precursor RNA, herein designated VGAM FOLDED PRECURSOR RNA, which has a two-dimensional hairpin structure. As is well known in the art, this hairpin structure, is typical of RNA encoded by miRNA genes, and is due to the fact that the nucleotide sequence of the first half of the RNA encoded by a miRNA gene is an accurate or partial inversed-reversed sequence of the nucleotide sequence of the second half thereof.

[3206] An enzyme complex designated DICER COMPLEX, dices the VGAM232 folded precursor RNA, herein designated VGAM FOLDED PRECURSOR RNA, into VGAM232 RNA, herein designated VGAM RNA, a single stranded ˜22 nt long RNA segment. As is known in the art, dicing of a hairpin structured RNA precursor product into a short ˜22 nt RNA segment is catalyzed by an enzyme complex comprising an enzyme called Dicer together with other necessary proteins. A probable (over 79%) nucleotide sequence of VGAM232 RNA is designated SEQ ID:567, and is provided hereinbelow with reference to the sequence listing part.

[3207] VGAM232 host target gene, herein designated VGAM HOST TARGET GENE, encodes a corresponding messenger RNA, VGAM232 host target RNA, herein designated VGAM HOST TARGET RNA. VGAM232 host target RNA, herein designated VGAM HOST TARGET RNA, comprises three regions, as is typical of mRNA of a protein coding gene: a 5 untranslated region, a protein coding region and a 3 untranslated region, designated 5UTR, PROTEIN CODING and 3UTR respectively.

[3208] VGAM232 RNA, herein designated VGAM RNA, binds complementarily to one or more host target binding sites located in untranslated regions of VGAM232 host target RNA, herein designated VGAM HOST TARGET RNA. This complementary binding is due to the fact that the nucleotide sequence of VGAM232 RNA, herein designated VGAM RNA, is an accurate or a partial inversed-reversed sequence of the nucleotide sequence of each of the host target binding sites. As an illustration, FIG. 1 shows 3 such host target binding sites, designated BINDING SITE I, BINDING SITE II and BINDING SITE III respectively. It is appreciated that the number of host target binding sites shown in FIG. 1 is meant as an illustration only, and is not meant to be limiting VGAM232 RNA, herein designated VGAM RNA, may have a different number of host target binding sites in untranslated regions of a VGAM232 host target RNA, herein designated VGAM HOST TARGET RNA. It is further appreciated that while FIG. 1 depicts host target binding sites in the 3UTR region, this is meant as an example only these host target binding sites may be located in the 3UTR region, the 5UTR region, or in both 3UTR and 5UTR regions.

[3209] The complementary binding of VGAM232 RNA, herein designated VGAM RNA, to host target binding sites on VGAM232 host target RNA, herein designated VGAM HOST TARGET RNA, such as BINDING SITE I, BINDING SITE II and BINDING SITE III, inhibits translation of VGAM232 host target RNA, herein designated VGAM HOST TARGET RNA, into VGAM232 host target protein, herein designated VGAM HOST TARGET PROTEIN. VGAM host target protein is therefore outlined by a broken line.

[3210] It is appreciated that VGAM232 host target gene, herein designated VGAM HOST TARGET GENE, in fact represents a plurality of VGAM232 host target genes. The mRNA of each one of this plurality of VGAM232 host target genes comprises one or more host target binding sites, each having a nucleotide sequence which is at least partly complementary to VGAM232 RNA, herein designated VGAM RNA, and which when bound by VGAM232 RNA, herein designated VGAM RNA, causes inhibition of translation of respective one or more VGAM232 host target proteins.

[3211] It is further appreciated by one skilled in the art that the mode of translational inhibition illustrated by FIG. 1 with specific reference to translational inhibition exerted by VGAM232 gene, herein designated VGAM GENE, on one or more VGAM232 host target gene, herein designated VGAM HOST TARGET GENE, is in fact common to other known non-viral miRNA genes. As mentioned hereinabove with reference to the background section, although a specific complementary binding site has been demonstrated only for some of the known miRNA genes (primarily Lin-4 and Let-7), all other recently discovered miRNA genes are also believed by those skilled in the art to modulate expression of other genes by complementary binding, although specific complementary binding sites of these other miRNA genes have not yet been found (Ruvkun G., Perspective: Glimpses of a tiny RNA world, Science 294, 779 (2001)).

[3212] It is yet further appreciated that a function of VGAM232 is inhibition of expression of host target genes, as part of a novel viral mechanism of attacking a host. Accordingly, utilities of VGAM232 include diagnosis, prevention and treatment of viral infection by Vaccinia virus. Specific functions, and accordingly utilities, of VGAM232 correlate with, and may be deduced from, the identity of the host target genes which VGAM232 binds and inhibits, and the function of these host target genes, as elaborated hereinbelow.

[3213] Nucleotide sequences of the VGAM232 precursor RNA, herein designated VGAM PRECURSOR RNA, and of the diced VGAM232 RNA, herein designated VGAM RNA, and a schematic representation of the secondary folding of VGAM232 folded precursor RNA, herein designated VGAM FOLDED PRECURSOR RNA, of VGAM232 are further described hereinbelow with reference to Table 1.

[3214] Nucleotide sequences of host target binding sites, such as BINDING SITE-I, BINDING SITE-II and BINDING SITE-III of FIG. 1, found on, and schematic representation of the complementarity of each of these host target binding sites to VGAM232 RNA, herein designated VGAM RNA, are described hereinbelow with reference to Table 2.

[3215] FIG. 1 further provides a conceptual description of another novel bioinformatically detected viral gene of the present invention, referred to here as Viral Genomic Address Messenger 233 (VGAM233) viral gene, which modulates expression of respective host target genes thereof, the function and utility of which host target genes is known in the art.

[3216] VGAM233 is a novel bioinformatically detected regulatory, non protein coding, viral micro RNA (miRNA) gene. The method by which VGAM233 was detected is described hereinabove with reference to FIGS. 2-8.

[3217] VGAM233 gene, herein designated VGAM GENE, is a viral gene contained in the genome of Vaccinia virus. VGAM233 host target gene, herein designated VGAM HOST TARGET GENE, is a human gene contained in the human genome.

[3218] VGAM233 gene, herein designated VGAM GENE, encodes a VGAM233 precursor RNA, herein designated VGAM PRECURSOR RNA. Similar to other miRNA genes, and unlike most ordinary genes, VGAM233 precursor RNA, herein designated VGAM PRECURSOR RNA, does not encode a protein. A nucleotide sequence identical or highly similar to the nucleotide sequence of VGAM233 precursor RNA is designated SEQ ID:219, and is provided hereinbelow with reference to the sequence listing part. Nucleotide sequence SEQ ID:219 is located at position 125406 relative to the genome of Vaccinia virus.

[3219] VGAM233 precursor RNA, herein designated VGAM PRECURSOR RNA, folds onto itself, forming VGAM233 folded precursor RNA, herein designated VGAM FOLDED PRECURSOR RNA, which has a two-dimensional hairpin structure. As is well known in the art, this hairpin structure, is typical of RNA encoded by miRNA genes, and is due to the fact that the nucleotide sequence of the first half of the RNA encoded by a miRNA gene is an accurate or partial inversed-reversed sequence of the nucleotide sequence of the second half thereof.

[3220] An enzyme complex designated DICER COMPLEX, dices the VGAM233 folded precursor RNA, herein designated VGAM FOLDED PRECURSOR RNA, into VGAM233 RNA, herein designated VGAM RNA, a single stranded ˜22 nt long RNA segment. As is known in the art, dicing of a hairpin structured RNA precursor product into a short ˜22 nt RNA segment is catalyzed by an enzyme complex comprising an enzyme called Dicer together with other necessary proteins. A probable (over 71%) nucleotide sequence of VGAM233 RNA is designated SEQ ID:568, and is provided hereinbelow with reference to the sequence listing part.

[3221] VGAM233 host target gene, herein designated VGAM HOST TARGET GENE, encodes a corresponding messenger RNA, VGAM233 host target RNA, herein designated VGAM HOST TARGET RNA. VGAM233 host target RNA, herein designated VGAM HOST TARGET RNA, comprises three regions, as is typical of mRNA of a protein coding gene: a 5 untranslated region, a protein coding region and a 3 untranslated region, designated 5UTR, PROTEIN CODING and 3UTR respectively.

[3222] VGAM233 RNA, herein designated VGAM RNA, binds complementarily to one or more host target binding sites located in untranslated regions of VGAM233 host target RNA, herein designated VGAM HOST TARGET RNA. This complementary binding is due to the fact that the nucleotide sequence of VGAM233 RNA, herein designated VGAM RNA, is an accurate or a partial inversed-reversed sequence of the nucleotide sequence of each of the host target binding sites. As an illustration, FIG. 1 shows 3 such host target binding sites, designated BINDING SITE I, BINDING SITE II and BINDING SITE III respectively. It is appreciated that the number of host target binding sites shown in FIG. 1 is meant as an illustration only, and is not meant to be limiting VGAM233 RNA, herein designated VGAM RNA, may have a different number of host target binding sites in untranslated regions of a VGAM233 host target RNA, herein designated VGAM HOST TARGET RNA. It is further appreciated that while FIG. 1 depicts host target binding sites in the 3UTR region, this is meant as an example only these host target binding sites may be located in the 3UTR region, the 5UTR region, or in both 3UTR and 5UTR regions.

[3223] The complementary binding of VGAM233 RNA, herein designated VGAM RNA, to host target binding sites on VGAM233 host target RNA, herein designated VGAM HOST TARGET RNA, such as BINDING SITE I, BINDING SITE II and BINDING SITE III, inhibits translation of VGAM233 host target RNA, herein designated VGAM HOST TARGET RNA, into VGAM233 host target protein, herein designated VGAM HOST TARGET PROTEIN. VGAM host target protein is therefore outlined by a broken line.

[3224] It is appreciated that VGAM233 host target gene, herein designated VGAM HOST TARGET GENE, in fact represents a plurality of VGAM233 host target genes. The mRNA of each one of this plurality of VGAM233 host target genes comprises one or more host target binding sites, each having a nucleotide sequence which is at least partly complementary to VGAM233 RNA, herein designated VGAM RNA, and which when bound by VGAM233 RNA, herein designated VGAM RNA, causes inhibition of translation of respective one or more VGAM233 host target proteins.

[3225] It is further appreciated by one skilled in the art that the mode of translational inhibition illustrated by FIG. 1 with specific reference to translational inhibition exerted by VGAM233 gene, herein designated VGAM GENE, on one or more VGAM233 host target gene, herein designated VGAM HOST TARGET GENE, is in fact common to other known non-viral miRNA genes. As mentioned hereinabove with reference to the background section, although a specific complementary binding site has been demonstrated only for some of the known miRNA genes (primarily Lin-4 and Let-7), all other recently discovered miRNA genes are also believed by those skilled in the art to modulate expression of other genes by complementary binding, although specific complementary binding sites of these other miRNA genes have not yet been found (Ruvkun G., Perspective: Glimpses of a tiny RNA world, Science 294, 779 (2001)).

[3226] It is yet further appreciated that a function of VGAM233 is inhibition of expression of host target genes, as part of a novel viral mechanism of attacking a host. Accordingly, utilities of VGAM233 include diagnosis, prevention and treatment of viral infection by Vaccinia virus. Specific functions, and accordingly utilities, of VGAM233 correlate with, and may be deduced from, the identity of the host target genes which VGAM233 binds and inhibits, and the function of these host target genes, as elaborated hereinbelow.

[3227] Nucleotide sequences of the VGAM233 precursor RNA, herein designated VGAM PRECURSOR RNA, and of the diced VGAM233 RNA, herein designated VGAM RNA, and a schematic representation of the secondary folding of VGAM233 folded precursor RNA, herein designated VGAM FOLDED PRECURSOR RNA, of VGAM233 are further described hereinbelow with reference to Table 1.

[3228] Nucleotide sequences of host target binding sites, such as BINDING SITE-I, BINDING SITE-II and BINDING SITE-III of FIG. 1, found on, and schematic representation of the complementarity of each of these host target binding sites to VGAM233 RNA, herein designated VGAM RNA, are described hereinbelow with reference to Table 2.

[3229] FIG. 1 further provides a conceptual description of another novel bioinformatically detected viral gene of the present invention, referred to here as Viral Genomic Address Messenger 234 (VGAM234) viral gene, which modulates expression of respective host target genes thereof, the function and utility of which host target genes is known in the art.

[3230] VGAM234 is a novel bioinformatically detected regulatory, non protein coding, viral micro RNA (miRNA) gene. The method by which VGAM234 was detected is described hereinabove with reference to FIGS. 2-8.

[3231] VGAM234 gene, herein designated VGAM GENE, is a viral gene contained in the genome of Vaccinia virus. VGAM234 host target gene, herein designated VGAM HOST TARGET GENE, is a human gene contained in the human genome.

[3232] VGAM234 gene, herein designated VGAM GENE, encodes a VGAM234 precursor RNA, herein designated VGAM PRECURSOR RNA. Similar to other miRNA genes, and unlike most ordinary genes, VGAM234 precursor RNA, herein designated VGAM PRECURSOR RNA, does not encode a protein. A nucleotide sequence identical or highly similar to the nucleotide sequence of VGAM234 precursor RNA is designated SEQ ID:220, and is provided hereinbelow with reference to the sequence listing part. Nucleotide sequence SEQ ID:220 is located at position 123394 relative to the genome of Vaccinia virus.

[3233] VGAM234 precursor RNA, herein designated VGAM PRECURSOR RNA, folds onto itself, forming VGAM234 folded precursor RNA, herein designated VGAM FOLDED PRECURSOR RNA, which has a two-dimensional hairpin structure. As is well known in the art, this hairpin structure, is typical of RNA encoded by miRNA genes, and is due to the fact that the nucleotide sequence of the first half of the RNA encoded by a miRNA gene is an accurate or partial inversed-reversed sequence of the nucleotide sequence of the second half thereof.

[3234] An enzyme complex designated DICER COMPLEX, dices the VGAM234 folded precursor RNA, herein designated VGAM FOLDED PRECURSOR RNA, into VGAM234 RNA, herein designated VGAM RNA, a single stranded ˜22 nt long RNA segment. As is known in the art, dicing of a hairpin structured RNA precursor product into a short ˜22 nt RNA segment is catalyzed by an enzyme complex comprising an enzyme called Dicer together with other necessary proteins. A probable (over 72%) nucleotide sequence of VGAM234 RNA is designated SEQ ID:569, and is provided hereinbelow with reference to the sequence listing part.

[3235] VGAM234 host target gene, herein designated VGAM HOST TARGET GENE, encodes a corresponding messenger RNA, VGAM234 host target RNA, herein designated VGAM HOST TARGET RNA. VGAM234 host target RNA, herein designated VGAM HOST TARGET RNA, comprises three regions, as is typical of mRNA of a protein coding gene: a 5 untranslated region, a protein coding region and a 3 untranslated region, designated 5UTR, PROTEIN CODING and 3UTR respectively.

[3236] VGAM234 RNA, herein designated VGAM RNA, binds complementarily to one or more host target binding sites located in untranslated regions of VGAM234 host target RNA, herein designated VGAM HOST TARGET RNA. This complementary binding is due to the fact that the nucleotide sequence of VGAM234 RNA, herein designated VGAM RNA, is an accurate or a partial inversed-reversed sequence of the nucleotide sequence of each of the host target binding sites. As an illustration, FIG. 1 shows 3 such host target binding sites, designated BINDING SITE I, BINDING SITE II and BINDING SITE III respectively. It is appreciated that the number of host target binding sites shown in FIG. 1 is meant as an illustration only, and is not meant to be limiting VGAM234 RNA, herein designated VGAM RNA, may have a different number of host target binding sites in untranslated regions of a VGAM234 host target RNA, herein designated VGAM HOST TARGET RNA. It is further appreciated that while FIG. 1 depicts host target binding sites in the 3UTR region, this is meant as an example only these host target binding sites may be located in the 3UTR region, the 5UTR region, or in both 3UTR and 5UTR regions.

[3237] The complementary binding of VGAM234 RNA, herein designated VGAM RNA, to host target binding sites on VGAM234 host target RNA, herein designated VGAM HOST TARGET RNA, such as BINDING SITE I, BINDING SITE II and BINDING SITE III, inhibits translation of VGAM234 host target RNA, herein designated VGAM HOST TARGET RNA, into VGAM234 host target protein, herein designated VGAM HOST TARGET PROTEIN. VGAM host target protein is therefore outlined by a broken line.

[3238] it is appreciated that VGAM234 host target gene, herein designated VGAM HOST TARGET GENE, in fact represents a plurality of VGAM234 host target genes. The mRNA of each one of this plurality of VGAM234 host target genes comprises one or more host target binding sites, each having a nucleotide sequence which is at least partly complementary to VGAM234 RNA, herein designated VGAM RNA, and which when bound by VGAM234 RNA, herein designated VGAM RNA, causes inhibition of translation of respective one or more VGAM234 host target proteins.

[3239] It is further appreciated by one skilled in the art that the mode of translational inhibition illustrated by FIG. 1 with specific reference to translational inhibition exerted by VGAM234 gene, herein designated VGAM GENE, on one or more VGAM234 host target gene, herein designated VGAM HOST TARGET GENE, is in fact common to other known non-viral miRNA genes. As mentioned hereinabove with reference to the background section, although a specific complementary binding site has been demonstrated only for some of the known miRNA genes (primarily Lin-4 and Let-7), all other recently discovered miRNA genes are also believed by those skilled in the art to modulate expression of other genes by complementary binding, although specific complementary binding sites of these other miRNA genes have not yet been found (Ruvkun G., Perspective: Glimpses of a tiny RNA world, Science 294, 779 (2001)).

[3240] It is yet further appreciated that a function of VGAM234 is inhibition of expression of host target genes, as part of a novel viral mechanism of attacking a host. Accordingly, utilities of VGAM234 include diagnosis, prevention and treatment of viral infection by Vaccinia virus. Specific functions, and accordingly utilities, of VGAM234 correlate with, and may be deduced from, the identity of the host target genes which VGAM234 binds and inhibits, and the function of these host target genes, as elaborated hereinbelow.

[3241] Nucleotide sequences of the VGAM234 precursor RNA, herein designated VGAM PRECURSOR RNA, and of the diced VGAM234 RNA, herein designated VGAM RNA, and a schematic representation of the secondary folding of VGAM234 folded precursor RNA, herein designated VGAM FOLDED PRECURSOR RNA, of VGAM234 are further described hereinbelow with reference to Table 1.

[3242] Nucleotide sequences of host target binding sites, such as BINDING SITE-I, BINDING SITE-II and BINDING SITE-III of FIG. 1, found on, and schematic representation of the complementarity of each of these host target binding sites to VGAM234 RNA, herein designated VGAM RNA, are described hereinbelow with reference to Table 2.

[3243] FIG. 1 further provides a conceptual description of another novel bioinformatically detected viral gene of the present invention, referred to here as Viral Genomic Address Messenger 235 (VGAM235) viral gene, which modulates expression of respective host target genes thereof, the function and utility of which host target genes is known in the art.

[3244] VGAM235 is a novel bioinformatically detected regulatory, non protein coding, viral micro RNA (miRNA) gene. The method by which VGAM235 was detected is described hereinabove with reference to FIGS. 2-8.

[3245] VGAM235 gene, herein designated VGAM GENE, is a viral gene contained in the genome of Vaccinia virus. VGAM235 host target gene, herein designated VGAM HOST TARGET GENE, is a human gene contained in the human genome.

[3246] VGAM235 gene, herein designated VGAM GENE, encodes a VGAM235 precursor RNA, herein designated VGAM PRECURSOR RNA. Similar to other miRNA genes, and unlike most ordinary genes, VGAM235 precursor RNA, herein designated VGAM PRECURSOR RNA, does not encode a protein. A nucleotide sequence identical or highly similar to the nucleotide sequence of VGAM235 precursor RNA is designated SEQ ID:221, and is provided hereinbelow with reference to the sequence listing part. Nucleotide sequence SEQ ID:221 is located at position 123220 relative to the genome of Vaccinia virus.

[3247] VGAM235 precursor RNA, herein designated VGAM PRECURSOR RNA, folds onto itself, forming VGAM235 folded precursor RNA, herein designated VGAM FOLDED PRECURSOR RNA, which has a two-dimensional hairpin structure. As is well known in the art, this hairpin structure, is typical of RNA encoded by miRNA genes, and is due to the fact that the nucleotide sequence of the first half of the RNA encoded by a miRNA gene is an accurate or partial inversed-reversed sequence of the nucleotide sequence of the second half thereof.

[3248] An enzyme complex designated DICER COMPLEX, dices the VGAM235 folded precursor RNA, herein designated VGAM FOLDED PRECURSOR RNA, into VGAM235 RNA, herein designated VGAM RNA, a single stranded ˜22 nt long RNA segment. As is known in the art, dicing of a hairpin structured RNA precursor product into a short ˜22 nt RNA segment is catalyzed by an enzyme complex comprising an enzyme called Dicer together with other necessary proteins. A probable (over 75%) nucleotide sequence of VGAM235 RNA is designated SEQ ID:570, and is provided hereinbelow with reference to the sequence listing part.

[3249] VGAM235 host target gene, herein designated VGAM HOST TARGET GENE, encodes a corresponding messenger RNA, VGAM235 host target RNA, herein designated VGAM HOST TARGET RNA. VGAM235 host target RNA, herein designated VGAM HOST TARGET RNA, comprises three regions, as is typical of mRNA of a protein coding gene: a 5 untranslated region, a protein coding region and a 3 untranslated region, designated 5UTR, PROTEIN CODING and 3UTR respectively.

[3250] VGAM235 RNA, herein designated VGAM RNA, binds complementarily to one or more host target binding sites located in untranslated regions of VGAM235 host target RNA, herein designated VGAM HOST TARGET RNA. This complementary binding is due to the fact that the nucleotide sequence of VGAM235 RNA, herein designated VGAM RNA, is an accurate or a partial inversed-reversed sequence of the nucleotide sequence of each of the host target binding sites. As an illustration, FIG. 1 shows 3 such host target binding sites, designated BINDING SITE I, BINDING SITE II and BINDING SITE III respectively. It is appreciated that the number of host target binding sites shown in FIG. 1 is meant as an illustration only, and is not meant to be limiting VGAM235 RNA, herein designated VGAM RNA, may have a different number of host target binding sites in untranslated regions of a VGAM235 host target RNA, herein designated VGAM HOST TARGET RNA. It is further appreciated that while FIG. 1 depicts host target binding sites in the 3UTR region, this is meant as an example only these host target binding sites may be located in the 3UTR region, the 5UTR region, or in both 3UTR and 5UTR regions.

[3251] The complementary binding of VGAM235 RNA, herein designated VGAM RNA, to host target binding sites on VGAM235 host target RNA, herein designated VGAM HOST TARGET RNA, such as BINDING SITE I, BINDING SITE II and BINDING SITE III, inhibits translation of VGAM235 host target RNA, herein designated VGAM HOST TARGET RNA, into VGAM235 host target protein, herein designated VGAM HOST TARGET PROTEIN. VGAM host target protein is therefore outlined by a broken line.

[3252] It is appreciated that VGAM235 host target gene, herein designated VGAM HOST TARGET GENE, in fact represents a plurality of VGAM235 host target genes. The mRNA of each one of this plurality of VGAM235 host target genes comprises one or more host target binding sites, each having a nucleotide sequence which is at least partly complementary to VGAM235 RNA, herein designated VGAM RNA, and which when bound by VGAM235 RNA, herein designated VGAM RNA, causes inhibition of translation of respective one or more VGAM235 host target proteins.

[3253] It is further appreciated by one skilled in the art that the mode of translational inhibition illustrated by FIG. 1 with specific reference to translational inhibition exerted by VGAM235 gene, herein designated VGAM GENE, on one or more VGAM235 host target gene, herein designated VGAM HOST TARGET GENE, is in fact common to other known non-viral miRNA genes. As mentioned hereinabove with reference to the background section, although a specific complementary binding site has been demonstrated only for some of the known miRNA genes (primarily Lin-4 and Let-7), all other recently discovered miRNA genes are also believed by those skilled in the art to modulate expression of other genes by complementary binding, although specific complementary binding sites of these other miRNA genes have not yet been found (Ruvkun G., Perspective: Glimpses of a tiny RNA world, Science 294, 779 (2001)).

[3254] It is yet further appreciated that a function of VGAM235 is inhibition of expression of host target genes, as part of a novel viral mechanism of attacking a host. Accordingly, utilities of VGAM235 include diagnosis, prevention and treatment of viral infection by Vaccinia virus. Specific functions, and accordingly utilities, of VGAM235 correlate with, and may be deduced from, the identity of the host target genes which VGAM235 binds and inhibits, and the function of these host target genes, as elaborated hereinbelow.

[3255] Nucleotide sequences of the VGAM235 precursor RNA, herein designated VGAM PRECURSOR RNA, and of the diced VGAM235 RNA, herein designated VGAM RNA, and a schematic representation of the secondary folding of VGAM235 folded precursor RNA, herein designated VGAM FOLDED PRECURSOR RNA, of VGAM235 are further described hereinbelow with reference to Table 1.

[3256] Nucleotide sequences of host target binding sites, such as BINDING SITE-I, BINDING SITE-II and BINDING SITE-III of FIG. 1, found on, and schematic representation of the complementarity of each of these host target binding sites to VGAM235 RNA, herein designated VGAM RNA, are described hereinbelow with reference to Table 2.

[3257] FIG. 1 further provides a conceptual description of another novel bioinformatically detected viral gene of the present invention, referred to here as Viral Genomic Address Messenger 236 (VGAM236) viral gene, which modulates expression of respective host target genes thereof, the function and utility of which host target genes is known in the art.

[3258] VGAM236 is a novel bioinformatically detected regulatory, non protein coding, viral micro RNA (miRNA) gene. The method by which VGAM236 was detected is described hereinabove with reference to FIGS. 2-8.

[3259] VGAM236 gene, herein designated VGAM GENE, is a viral gene contained in the genome of Vaccinia virus. VGAM236 host target gene, herein designated VGAM HOST TARGET GENE, is a human gene contained in the human genome.

[3260] VGAM236 gene, herein designated VGAM GENE, encodes a VGAM236 precursor RNA, herein designated VGAM PRECURSOR RNA. Similar to other miRNA genes, and unlike most ordinary genes, VGAM236 precursor RNA, herein designated VGAM PRECURSOR RNA, does not encode a protein. A nucleotide sequence identical or highly similar to the nucleotide sequence of VGAM236 precursor RNA is designated SEQ ID:222, and is provided hereinbelow with reference to the sequence listing part. Nucleotide sequence SEQ ID:222 is located at position 124655 relative to the genome of Vaccinia virus.

[3261] VGAM236 precursor RNA, herein designated VGAM PRECURSOR RNA, folds onto itself, forming VGAM236 folded precursor RNA, herein designated VGAM FOLDED PRECURSOR RNA, which has a two-dimensional hairpin structure. As is well known in the art, this hairpin structure, is typical of RNA encoded by miRNA genes, and is due to the fact that the nucleotide sequence of the first half of the RNA encoded by a miRNA gene is an accurate or partial inversed-reversed sequence of the nucleotide sequence of the second half thereof.

[3262] An enzyme complex designated DICER COMPLEX, dices the VGAM236 folded precursor RNA, herein designated VGAM FOLDED PRECURSOR RNA, into VGAM236 RNA, herein designated VGAM RNA, a single stranded ˜22 nt long RNA segment. As is known in the art, dicing of a hairpin structured RNA precursor product into a short ˜22 nt RNA segment is catalyzed by an enzyme complex comprising an enzyme called Dicer together with other necessary proteins. A probable (over 77%) nucleotide sequence of VGAM236 RNA is designated SEQ ID:571, and is provided hereinbelow with reference to the sequence listing part.

[3263] VGAM236 host target gene, herein designated VGAM HOST TARGET GENE, encodes a corresponding messenger RNA, VGAM236 host target RNA, herein designated VGAM HOST TARGET RNA. VGAM236 host target RNA, herein designated VGAM HOST TARGET RNA, comprises three regions, as is typical of mRNA of a protein coding gene: a 5 untranslated region, a protein coding region and a 3 untranslated region, designated 5UTR, PROTEIN CODING and 3UTR respectively.

[3264] VGAM236 RNA, herein designated VGAM RNA, binds complementarily to one or more host target binding sites located in untranslated regions of VGAM236 host target RNA, herein designated VGAM HOST TARGET RNA. This complementary binding is due to the fact that the nucleotide sequence of VGAM236 RNA, herein designated VGAM RNA, is an accurate or a partial inversed-reversed sequence of the nucleotide sequence of each of the host target binding sites. As an illustration, FIG. 1 shows 3 such host target binding sites, designated BINDING SITE I, BINDING SITE II and BINDING SITE III respectively. It is appreciated that the number of host target binding sites shown in FIG. 1 is meant as an illustration only, and is not meant to be limiting VGAM236 RNA, herein designated VGAM RNA, may have a different number of host target binding sites in untranslated regions of a VGAM236 host target RNA, herein designated VGAM HOST TARGET RNA. It is further appreciated that while FIG. 1 depicts host target binding sites in the 3UTR region, this is meant as an example only these host target binding sites may be located in the 3UTR region, the 5UTR region, or in both 3UTR and 5UTR regions.

[3265] The complementary binding of VGAM236 RNA, herein designated VGAM RNA, to host target binding sites on VGAM236 host target RNA, herein designated VGAM HOST TARGET RNA, such as BINDING SITE I, BINDING SITE II and BINDING SITE III, inhibits translation of VGAM236 host target RNA, herein designated VGAM HOST TARGET RNA, into VGAM236 host target protein, herein designated VGAM HOST TARGET PROTEIN. VGAM host target protein is therefore outlined by a broken line.

[3266] It is appreciated that VGAM236 host target gene, herein designated VGAM HOST TARGET GENE, in fact represents a plurality of VGAM236 host target genes. The mRNA of each one of this plurality of VGAM236 host target genes comprises one or more host target binding sites, each having a nucleotide sequence which is at least partly complementary to VGAM236 RNA, herein designated VGAM RNA, and which when bound by VGAM236 RNA, herein designated VGAM RNA, causes inhibition of translation of respective one or more VGAM236 host target proteins.

[3267] It is further appreciated by one skilled in the art that the mode of translational inhibition illustrated by FIG. 1 with specific reference to translational inhibition exerted by VGAM236 gene, herein designated VGAM GENE, on one or more VGAM236 host target gene, herein designated VGAM HOST TARGET GENE, is in fact common to other known non-viral miRNA genes. As mentioned hereinabove with reference to the background section, although a specific complementary binding site has been demonstrated only for some of the known miRNA genes (primarily Lin-4 and Let-7), all other recently discovered miRNA genes are also believed by those skilled in the art to modulate expression of other genes by complementary binding, although specific complementary binding sites of these other miRNA genes have not yet been found (Ruvkun G., Perspective: Glimpses of a tiny RNA world, Science 294, 779 (2001)).

[3268] It is yet further appreciated that a function of VGAM236 is inhibition of expression of host target genes, as part of a novel viral mechanism of attacking a host. Accordingly, utilities of VGAM236 include diagnosis, prevention and treatment of viral infection by Vaccinia virus. Specific functions, and accordingly utilities, of VGAM236 correlate with, and may be deduced from, the identity of the host target genes which VGAM236 binds and inhibits, and the function of these host target genes, as elaborated hereinbelow.

[3269] Nucleotide sequences of the VGAM236 precursor RNA, herein designated VGAM PRECURSOR RNA, and of the diced VGAM236 RNA, herein designated VGAM RNA, and a schematic representation of the secondary folding of VGAM236 folded precursor RNA, herein designated VGAM FOLDED PRECURSOR RNA, of VGAM236 are further described hereinbelow with reference to Table 1.

[3270] Nucleotide sequences of host target binding sites, such as BINDING SITE-I, BINDING SITE-II and BINDING SITE-III of FIG. 1, found on, and schematic representation of the complementarity of each of these host target binding sites to VGAM236 RNA, herein designated VGAM RNA, are described hereinbelow with reference to Table 2.

[3271] FIG. 1 further provides a conceptual description of another novel bioinformatically detected viral gene of the present invention, referred to here as Viral Genomic Address Messenger 237 (VGAM237) viral gene, which modulates expression of respective host target genes thereof, the function and utility of which host target genes is known in the art.

[3272] VGAM237 is a novel bioinformatically detected regulatory, non protein coding, viral micro RNA (miRNA) gene. The method by which VGAM237 was detected is described hereinabove with reference to FIGS. 2-8.

[3273] VGAM237 gene, herein designated VGAM GENE, is a viral gene contained in the genome of Vaccinia virus. VGAM237 host target gene, herein designated VGAM HOST TARGET GENE, is a human gene contained in the human genome.

[3274] VGAM237 gene, herein designated VGAM GENE, encodes a VGAM237 precursor RNA, herein designated VGAM PRECURSOR RNA. Similar to other miRNA genes, and unlike most ordinary genes, VGAM237 precursor RNA, herein designated VGAM PRECURSOR RNA, does not encode a protein. A nucleotide sequence identical or highly similar to the nucleotide sequence of VGAM237 precursor RNA is designated SEQ ID:223, and is provided hereinbelow with reference to the sequence listing part. Nucleotide sequence SEQ ID:223 is located at position 127745 relative to the genome of Vaccinia virus.

[3275] VGAM237 precursor RNA, herein designated VGAM PRECURSOR RNA, folds onto itself, forming VGAM237 folded precursor RNA, herein designated VGAM FOLDED PRECURSOR RNA, which has a two-dimensional hairpin structure. As is well known in the art, this hairpin structure, is typical of RNA encoded by miRNA genes, and is due to the fact that the nucleotide sequence of the first half of the RNA encoded by a miRNA gene is an accurate or partial inversed-reversed sequence of the nucleotide sequence of the second half thereof.

[3276] An enzyme complex designated DICER COMPLEX, dices the VGAM237 folded precursor RNA, herein designated VGAM FOLDED PRECURSOR RNA, into VGAM237 RNA, herein designated VGAM RNA, a single stranded ˜22 nt long RNA segment. As is known in the art, dicing of a hairpin structured RNA precursor product into a short ˜22 nt RNA segment is catalyzed by an enzyme complex comprising an enzyme called Dicer together with other necessary proteins. A probable (over 83%) nucleotide sequence of VGAM237 RNA is designated SEQ ID:572, and is provided hereinbelow with reference to the sequence listing part.

[3277] VGAM237 host target gene, herein designated VGAM HOST TARGET GENE, encodes a corresponding messenger RNA, VGAM237 host target RNA, herein designated VGAM HOST TARGET RNA. VGAM237 host target RNA, herein designated VGAM HOST TARGET RNA, comprises three regions, as is typical of mRNA of a protein coding gene: a 5 untranslated region, a protein coding region and a 3 untranslated region, designated 5UTR, PROTEIN CODING and 3UTR respectively.

[3278] VGAM237 RNA, herein designated VGAM RNA, binds complementarily to one or more host target binding sites located in untranslated regions of VGAM237 host target RNA, herein designated VGAM HOST TARGET RNA. This complementary binding is due to the fact that the nucleotide sequence of VGAM237 RNA, herein designated VGAM RNA, is an accurate or a partial inversed-reversed sequence of the nucleotide sequence of each of the host target binding sites. As an illustration, FIG. 1 shows 3 such host target binding sites, designated BINDING SITE I, BINDING SITE II and BINDING SITE III respectively. It is appreciated that the number of host target binding sites shown in FIG. 1 is meant as an illustration only, and is not meant to be limiting VGAM237 RNA, herein designated VGAM RNA, may have a different number of host target binding sites in untranslated regions of a VGAM237 host target RNA, herein designated VGAM HOST TARGET RNA. It is further appreciated that while FIG. 1 depicts host target binding sites in the 3UTR region, this is meant as an example only these host target binding sites may be located in the 3UTR region, the 5UTR region, or in both 3UTR and 5UTR regions.

[3279] The complementary binding of VGAM237 RNA, herein designated VGAM RNA, to host target binding sites on VGAM237 host target RNA, herein designated VGAM HOST TARGET RNA, such as BINDING SITE I, BINDING SITE II and BINDING SITE III, inhibits translation of VGAM237 host target RNA, herein designated VGAM HOST TARGET RNA, into VGAM237 host target protein, herein designated VGAM HOST TARGET PROTEIN. VGAM host target protein is therefore outlined by a broken line.

[3280] It is appreciated that VGAM237 host target gene, herein designated VGAM HOST TARGET GENE, in fact represents a plurality of VGAM237 host target genes. The mRNA of each one of this plurality of VGAM237 host target genes comprises one or more host target binding sites, each having a nucleotide sequence which is at least partly complementary to VGAM237 RNA, herein designated VGAM RNA, and which when bound by VGAM237 RNA, herein designated VGAM RNA, causes inhibition of translation of respective one or more VGAM237 host target proteins.

[3281] It is further appreciated by one skilled in the art that the mode of translational inhibition illustrated by FIG. 1 with specific reference to translational inhibition exerted by VGAM237 gene, herein designated VGAM GENE, on one or more VGAM237 host target gene, herein designated VGAM HOST TARGET GENE, is in fact common to other known non-viral miRNA genes. As mentioned hereinabove with reference to the background section, although a specific complementary binding site has been demonstrated only for some of the known miRNA genes (primarily Lin-4 and Let-7), all other recently discovered miRNA genes are also believed by those skilled in the art to modulate expression of other genes by complementary binding, although specific complementary binding sites of these other miRNA genes have not yet been found (Ruvkun G., Perspective: Glimpses of a tiny RNA world, Science 294, 779 (2001)).

[3282] It is yet further appreciated that a function of VGAM237 is inhibition of expression of host target genes, as part of a novel viral mechanism of attacking a host. Accordingly, utilities of VGAM237 include diagnosis, prevention and treatment of viral infection by Vaccinia virus. Specific functions, and accordingly utilities, of VGAM237 correlate with, and may be deduced from, the identity of the host target genes which VGAM237 binds and inhibits, and the function of these host target genes, as elaborated hereinbelow.

[3283] Nucleotide sequences of the VGAM237 precursor RNA, herein designated VGAM PRECURSOR RNA, and of the diced VGAM237 RNA, herein designated VGAM RNA, and a schematic representation of the secondary folding of VGAM237 folded precursor RNA, herein designated VGAM FOLDED PRECURSOR RNA, of VGAM237 are further described hereinbelow with reference to Table 1.

[3284] Nucleotide sequences of host target binding sites, such as BINDING SITE-I, BINDING SITE-II and BINDING SITE-III of FIG. 1, found on, and schematic representation of the complementarity of each of these host target binding sites to VGAM237 RNA, herein designated VGAM RNA, are described hereinbelow with reference to Table 2.

[3285] FIG. 1 further provides a conceptual description of another novel bioinformatically detected viral gene of the present invention, referred to here as Viral Genomic Address Messenger 238 (VGAM238) viral gene, which modulates expression of respective host target genes thereof, the function and utility of which host target genes is known in the art.

[3286] VGAM238 is a novel bioinformatically detected regulatory, non protein coding, viral micro RNA (miRNA) gene. The method by which VGAM238 was detected is described hereinabove with reference to FIGS. 2-8.

[3287] VGAM238 gene, herein designated VGAM GENE, is a viral gene contained in the genome of Vaccinia virus. VGAM238 host target gene, herein designated VGAM HOST TARGET GENE, is a human gene contained in the human genome.

[3288] VGAM238 gene, herein designated VGAM GENE, encodes a VGAM238 precursor RNA, herein designated VGAM PRECURSOR RNA. Similar to other miRNA genes, and unlike most ordinary genes, VGAM238 precursor RNA, herein designated VGAM PRECURSOR RNA, does not encode a protein. A nucleotide sequence identical or highly similar to the nucleotide sequence of VGAM238 precursor RNA is designated SEQ ID:224, and is provided hereinbelow with reference to the sequence listing part. Nucleotide sequence SEQ ID:224 is located at position 126291 relative to the genome of Vaccinia virus.

[3289] VGAM238 precursor RNA, herein designated VGAM PRECURSOR RNA, folds onto itself, forming VGAM238 folded precursor RNA, herein designated VGAM FOLDED PRECURSOR RNA, which has a two-dimensional hairpin structure. As is well known in the art, this hairpin structure, is typical of RNA encoded by miRNA genes, and is due to the fact that the nucleotide sequence of the first half of the RNA encoded by a miRNA gene is an accurate or partial inversed-reversed sequence of the nucleotide sequence of the second half thereof.

[3290] An enzyme complex designated DICER COMPLEX, dices the VGAM238 folded precursor RNA, herein designated VGAM FOLDED PRECURSOR RNA, into VGAM238 RNA, herein designated VGAM RNA, a single stranded ˜22 nt long RNA segment. As is known in the art, dicing of a hairpin structured RNA precursor product into a short ˜22 nt RNA segment is catalyzed by an enzyme complex comprising an enzyme called Dicer together with other necessary proteins. A probable (over 85%) nucleotide sequence of VGAM238 RNA is designated SEQ ID:573, and is provided hereinbelow with reference to the sequence listing part.

[3291] VGAM238 host target gene, herein designated VGAM HOST TARGET GENE, encodes a corresponding messenger RNA, VGAM238 host target RNA, herein designated VGAM HOST TARGET RNA. VGAM238 host target RNA, herein designated VGAM HOST TARGET RNA, comprises three regions, as is typical of mRNA of a protein coding gene: a 5 untranslated region, a protein coding region and a 3 untranslated region, designated 5UTR, PROTEIN CODING and 3UTR respectively.

[3292] VGAM238 RNA, herein designated VGAM RNA, binds complementarily to one or more host target binding sites located in untranslated regions of VGAM238 host target RNA, herein designated VGAM HOST TARGET RNA. This complementary binding is due to the fact that the nucleotide sequence of VGAM238 RNA, herein designated VGAM RNA, is an accurate or a partial inversed-reversed sequence of the nucleotide sequence of each of the host target binding sites. As an illustration, FIG. 1 shows 3 such host target binding sites, designated BINDING SITE I, BINDING SITE II and BINDING SITE III respectively. It is appreciated that the number of host target binding sites shown in FIG. 1 is meant as an illustration only, and is not meant to be limiting VGAM238 RNA, herein designated VGAM RNA, may have a different number of host target binding sites in untranslated regions of a VGAM238 host target RNA, herein designated VGAM HOST TARGET RNA. It is further appreciated that while FIG. 1 depicts host target binding sites in the 3UTR region, this is meant as an example only these host target binding sites may be located in the 3UTR region, the 5UTR region, or in both 3UTR and 5UTR regions.

[3293] The complementary binding of VGAM238 RNA, herein designated VGAM RNA, to host target binding sites on VGAM238 host target RNA, herein designated VGAM HOST TARGET RNA, such as BINDING SITE I, BINDING SITE II and BINDING SITE III, inhibits translation of VGAM238 host target RNA, herein designated VGAM HOST TARGET RNA, into VGAM238 host target protein, herein designated VGAM HOST TARGET PROTEIN. VGAM host target protein is therefore outlined by a broken line.

[3294] It is appreciated that VGAM238 host target gene, herein designated VGAM HOST TARGET GENE, in fact represents a plurality of VGAM238 host target genes. The mRNA of each one of this plurality of VGAM238 host target genes comprises one or more host target binding sites, each having a nucleotide sequence which is at least partly complementary to VGAM238 RNA, herein designated VGAM RNA, and which when bound by VGAM238 RNA, herein designated VGAM RNA, causes inhibition of translation of respective one or more VGAM238 host target proteins.

[3295] It is further appreciated by one skilled in the art that the mode of translational inhibition illustrated by FIG. 1 with specific reference to translational inhibition exerted by VGAM238 gene, herein designated VGAM GENE, on one or more VGAM238 host target gene, herein designated VGAM HOST TARGET GENE, is in fact common to other known non-viral miRNA genes. As mentioned hereinabove with reference to the background section, although a specific complementary binding site has been demonstrated only for some of the known miRNA genes (primarily Lin-4 and Let-7), all other recently discovered miRNA genes are also believed by those skilled in the art to modulate expression of other genes by complementary binding, although specific complementary binding sites of these other miRNA genes have not yet been found (Ruvkun G., Perspective: Glimpses of a tiny RNA world, Science 294, 779 (2001)).

[3296] It is yet further appreciated that a function of VGAM238 is inhibition of expression of host target genes, as part of a novel viral mechanism of attacking a host. Accordingly, utilities of VGAM238 include diagnosis, prevention and treatment of viral infection by Vaccinia virus. Specific functions, and accordingly utilities, of VGAM238 correlate with, and may be deduced from, the identity of the host target genes which VGAM238 binds and inhibits, and the function of these host target genes, as elaborated hereinbelow.

[3297] Nucleotide sequences of the VGAM238 precursor RNA, herein designated VGAM PRECURSOR RNA, and of the diced VGAM238 RNA, herein designated VGAM RNA, and a schematic representation of the secondary folding of VGAM238 folded precursor RNA, herein designated VGAM FOLDED PRECURSOR RNA, of VGAM238 are further described hereinbelow with reference to Table 1.

[3298] Nucleotide sequences of host target binding sites, such as BINDING SITE-I, BINDING SITE-II and BINDING SITE-III of FIG. 1, found on, and schematic representation of the complementarity of each of these host target binding sites to VGAM238 RNA, herein designated VGAM RNA, are described hereinbelow with reference to Table 2.

[3299] FIG. 1 further provides a conceptual description of another novel bioinformatically detected viral gene of the present invention, referred to here as Viral Genomic Address Messenger 239 (VGAM239) viral gene, which modulates expression of respective host target genes thereof, the function and utility of which host target genes is known in the art.

[3300] VGAM239 is a novel bioinformatically detected regulatory, non protein coding, viral micro RNA (miRNA) gene. The method by which VGAM239 was detected is described hereinabove with reference to FIGS. 2-8.

[3301] VGAM239 gene, herein designated VGAM GENE, is a viral gene contained in the genome of Vaccinia virus. VGAM239 host target gene, herein designated VGAM HOST TARGET GENE, is a human gene contained in the human genome.

[3302] VGAM239 gene, herein designated VGAM GENE, encodes a VGAM239 precursor RNA, herein designated VGAM PRECURSOR RNA. Similar to other miRNA genes, and unlike most ordinary genes, VGAM239 precursor RNA, herein designated VGAM PRECURSOR RNA, does not encode a protein. A nucleotide sequence identical or highly similar to the nucleotide sequence of VGAM239 precursor RNA is designated SEQ ID:225, and is provided hereinbelow with reference to the sequence listing part. Nucleotide sequence SEQ ID:225 is located at position 127132 relative to the genome of Vaccinia virus.

[3303] VGAM239 precursor RNA, herein designated VGAM PRECURSOR RNA, folds onto itself, forming VGAM239 folded precursor RNA, herein designated VGAM FOLDED PRECURSOR RNA, which has a two-dimensional hairpin structure. As is well known in the art, this hairpin structure, is typical of RNA encoded by miRNA genes, and is due to the fact that the nucleotide sequence of the first half of the RNA encoded by a miRNA gene is an accurate or partial inversed-reversed sequence of the nucleotide sequence of the second half thereof.

[3304] An enzyme complex designated DICER COMPLEX, dices the VGAM239 folded precursor RNA, herein designated VGAM FOLDED PRECURSOR RNA, into VGAM239 RNA, herein designated VGAM RNA, a single stranded ˜22 nt long RNA segment. As is known in the art, dicing of a hairpin structured RNA precursor product into a short ˜22 nt RNA segment is catalyzed by an enzyme complex comprising an enzyme called Dicer together with other necessary proteins. A probable (over 89%) nucleotide sequence of VGAM239 RNA is designated SEQ ID:574, and is provided hereinbelow with reference to the sequence listing part.

[3305] VGAM239 host target gene, herein designated VGAM HOST TARGET GENE, encodes a corresponding messenger RNA, VGAM239 host target RNA, herein designated VGAM HOST TARGET RNA. VGAM239 host target RNA, herein designated VGAM HOST TARGET RNA, comprises three regions, as is typical of mRNA of a protein coding gene: a 5 untranslated region, a protein coding region and a 3 untranslated region, designated 5UTR, PROTEIN CODING and 3UTR respectively.

[3306] VGAM239 RNA, herein designated VGAM RNA, binds complementarily to one or more host target binding sites located in untranslated regions of VGAM239 host target RNA, herein designated VGAM HOST TARGET RNA. This complementary binding is due to the fact that the nucleotide sequence of VGAM239 RNA, herein designated VGAM RNA, is an accurate or a partial inversed-reversed sequence of the nucleotide sequence of each of the host target binding sites. As an illustration, FIG. 1 shows 3 such host target binding sites, designated BINDING SITE I, BINDING SITE II and BINDING SITE III respectively. It is appreciated that the number of host target binding sites shown in FIG. 1 is meant as an illustration only, and is not meant to be limiting VGAM239 RNA, herein designated VGAM RNA, may have a different number of host target binding sites in untranslated regions of a VGAM239 host target RNA, herein designated VGAM HOST TARGET RNA. It is further appreciated that while FIG. 1 depicts host target binding sites in the 3UTR region, this is meant as an example only these host target binding sites may be located in the 3UTR region, the 5UTR region, or in both 3UTR and 5UTR regions.

[3307] The complementary binding of VGAM239 RNA, herein designated VGAM RNA, to host target binding sites on VGAM239 host target RNA, herein designated VGAM HOST TARGET RNA, such as BINDING SITE I, BINDING SITE II and BINDING SITE III, inhibits translation of VGAM239 host target RNA, herein designated VGAM HOST TARGET RNA, into VGAM239 host target protein, herein designated VGAM HOST TARGET PROTEIN. VGAM host target protein is therefore outlined by a broken line.

[3308] It is appreciated that VGAM239 host target gene, herein designated VGAM HOST TARGET GENE, in fact represents a plurality of VGAM239 host target genes. The mRNA of each one of this plurality of VGAM239 host target genes comprises one or more host target binding sites, each having a nucleotide sequence which is at least partly complementary to VGAM239 RNA, herein designated VGAM RNA, and which when bound by VGAM239 RNA, herein designated VGAM RNA, causes inhibition of translation of respective one or more VGAM239 host target proteins.

[3309] It is further appreciated by one skilled in the art that the mode of translational inhibition illustrated by FIG. 1 with specific reference to translational inhibition exerted by VGAM239 gene, herein designated VGAM GENE, on one or more VGAM239 host target gene, herein designated VGAM HOST TARGET GENE, is in fact common to other known non-viral miRNA genes. As mentioned hereinabove with reference to the background section, although a specific complementary binding site has been demonstrated only for some of the known miRNA genes (primarily Lin-4 and Let-7), all other recently discovered miRNA genes are also believed by those skilled in the art to modulate expression of other genes by complementary binding, although specific complementary binding sites of these other miRNA genes have not yet been found (Ruvkun G., Perspective: Glimpses of a tiny RNA world, Science 294, 779 (2001)).

[3310] It is yet further appreciated that a function of VGAM239 is inhibition of expression of host target genes, as part of a novel viral mechanism of attacking a host. Accordingly, utilities of VGAM239 include diagnosis, prevention and treatment of viral infection by Vaccinia virus. Specific functions, and accordingly utilities, of VGAM239 correlate with, and may be deduced from, the identity of the host target genes which VGAM239 binds and inhibits, and the function of these host target genes, as elaborated hereinbelow.

[3311] Nucleotide sequences of the VGAM239 precursor RNA, herein designated VGAM PRECURSOR RNA, and of the diced VGAM239 RNA, herein designated VGAM RNA, and a schematic representation of the secondary folding of VGAM239 folded precursor RNA, herein designated VGAM FOLDED PRECURSOR RNA, of VGAM239 are further described hereinbelow with reference to Table 1.

[3312] Nucleotide sequences of host target binding sites, such as BINDING SITE-I, BINDING SITE-II and BINDING SITE-III of FIG. 1, found on, and schematic representation of the complementarity of each of these host target binding sites to VGAM239 RNA, herein designated VGAM RNA, are described hereinbelow with reference to Table 2.

[3313] FIG. 1 further provides a conceptual description of another novel bioinformatically detected viral gene of the present invention, referred to here as Viral Genomic Address Messenger 240 (VGAM240) viral gene, which modulates expression of respective host target genes thereof, the function and utility of which host target genes is known in the art.

[3314] VGAM240 is a novel bioinformatically detected regulatory, non protein coding, viral micro RNA (miRNA) gene. The method by which VGAM240 was detected is described hereinabove with reference to FIGS. 2-8.

[3315] VGAM240 gene, herein designated VGAM GENE, is a viral gene contained in the genome of Vaccinia virus. VGAM240 host target gene, herein designated VGAM HOST TARGET GENE, is a human gene contained in the human genome.

[3316] VGAM240 gene, herein designated VGAM GENE, encodes a VGAM240 precursor RNA, herein designated VGAM PRECURSOR RNA. Similar to other miRNA genes, and unlike most ordinary genes, VGAM240 precursor RNA, herein designated VGAM PRECURSOR RNA, does not encode a protein. A nucleotide sequence identical or highly similar to the nucleotide sequence of VGAM240 precursor RNA is designated SEQ ID:226, and is provided hereinbelow with reference to the sequence listing part. Nucleotide sequence SEQ ID:226 is located at position 129602 relative to the genome of Vaccinia virus.

[3317] VGAM240 precursor RNA, herein designated VGAM PRECURSOR RNA, folds onto itself, forming VGAM240 folded precursor RNA, herein designated VGAM FOLDED PRECURSOR RNA, which has a two-dimensional hairpin structure. As is well known in the art, this hairpin structure, is typical of RNA encoded by miRNA genes, and is due to the fact that the nucleotide sequence of the first half of the RNA encoded by a miRNA gene is an accurate or partial inversed-reversed sequence of the nucleotide sequence of the second half thereof.

[3318] An enzyme complex designated DICER COMPLEX, dices the VGAM240 folded precursor RNA, herein designated VGAM FOLDED PRECURSOR RNA, into VGAM240 RNA, herein designated VGAM RNA, a single stranded ˜22 nt long RNA segment. As is known in the art, dicing of a hairpin structured RNA precursor product into a short ˜22 nt RNA segment is catalyzed by an enzyme complex comprising an enzyme called Dicer together with other necessary proteins. A probable (over 75%) nucleotide sequence of VGAM240 RNA is designated SEQ ID:575, and is provided hereinbelow with reference to the sequence listing part.

[3319] VGAM240 host target gene, herein designated VGAM HOST TARGET GENE, encodes a corresponding messenger RNA, VGAM240 host target RNA, herein designated VGAM HOST TARGET RNA. VGAM240 host target RNA, herein designated VGAM HOST TARGET RNA, comprises three regions, as is typical of mRNA of a protein coding gene: a 5 untranslated region, a protein coding region and a 3 untranslated region, designated 5UTR, PROTEIN CODING and 3UTR respectively.

[3320] VGAM240 RNA, herein designated VGAM RNA, binds complementarily to one or more host target binding sites located in untranslated regions of VGAM240 host target RNA, herein designated VGAM HOST TARGET RNA. This complementary binding is due to the fact that the nucleotide sequence of VGAM240 RNA, herein designated VGAM RNA, is an accurate or a partial inversed-reversed sequence of the nucleotide sequence of each of the host target binding sites. As an illustration, FIG. 1 shows 3 such host target binding sites, designated BINDING SITE I, BINDING SITE II and BINDING SITE III respectively. It is appreciated that the number of host target binding sites shown in FIG. 1 is meant as an illustration only, and is not meant to be limiting VGAM240 RNA, herein designated VGAM RNA, may have a different number of host target binding sites in untranslated regions of a VGAM240 host target RNA, herein designated VGAM HOST TARGET RNA. It is further appreciated that while FIG. 1 depicts host target binding sites in the 3UTR region, this is meant as an example only these host target binding sites may be located in the 3UTR region, the 5UTR region, or in both 3UTR and 5UTR regions.

[3321] The complementary binding of VGAM240 RNA, herein designated VGAM RNA, to host target binding sites on VGAM240 host target RNA, herein designated VGAM HOST TARGET RNA, such as BINDING SITE I, BINDING SITE II and BINDING SITE III, inhibits translation of VGAM240 host target RNA, herein designated VGAM HOST TARGET RNA, into VGAM240 host target protein, herein designated VGAM HOST TARGET PROTEIN. VGAM host target protein is therefore outlined by a broken line.

[3322] It is appreciated that VGAM240 host target gene, herein designated VGAM HOST TARGET GENE, in fact represents a plurality of VGAM240 host target genes. The mRNA of each one of this plurality of VGAM240 host target genes comprises one or more host target binding sites, each having a nucleotide sequence which is at least partly complementary to VGAM240 RNA, herein designated VGAM RNA, and which when bound by VGAM240 RNA, herein designated VGAM RNA, causes inhibition of translation of respective one or more VGAM240 host target proteins.

[3323] It is further appreciated by one skilled in the art that the mode of translational inhibition illustrated by FIG. 1 with specific reference to translational inhibition exerted by VGAM240 gene, herein designated VGAM GENE, on one or more VGAM240 host target gene, herein designated VGAM HOST TARGET GENE, is in fact common to other known non-viral miRNA genes. As mentioned hereinabove with reference to the background section, although a specific complementary binding site has been demonstrated only for some of the known miRNA genes (primarily Lin-4 and Let-7), all other recently discovered miRNA genes are also believed by those skilled in the art to modulate expression of other genes by complementary binding, although specific complementary binding sites of these other miRNA genes have not yet been found (Ruvkun G., Perspective: Glimpses of a tiny RNA world, Science 294, 779 (2001)).

[3324] It is yet further appreciated that a function of VGAM240 is inhibition of expression of host target genes, as part of a novel viral mechanism of attacking a host. Accordingly, utilities of VGAM240 include diagnosis, prevention and treatment of viral infection by Vaccinia virus. Specific functions, and accordingly utilities, of VGAM240 correlate with, and may be deduced from, the identity of the host target genes which VGAM240 binds and inhibits, and the function of these host target genes, as elaborated hereinbelow.

[3325] Nucleotide sequences of the VGAM240 precursor RNA, herein designated VGAM PRECURSOR RNA, and of the diced VGAM240 RNA, herein designated VGAM RNA, and a schematic representation of the secondary folding of VGAM240 folded precursor RNA, herein designated VGAM FOLDED PRECURSOR RNA, of VGAM240 are further described hereinbelow with reference to Table 1.

[3326] Nucleotide sequences of host target binding sites, such as BINDING SITE-I, BINDING SITE-II and BINDING SITE-III of FIG. 1, found on, and schematic representation of the complementarity of each of these host target binding sites to VGAM240 RNA, herein designated VGAM RNA, are described hereinbelow with reference to Table 2.

[3327] FIG. 1 further provides a conceptual description of another novel bioinformatically detected viral gene of the present invention, referred to here as Viral Genomic Address Messenger 241 (VGAM241) viral gene, which modulates expression of respective host target genes thereof, the function and utility of which host target genes is known in the art.

[3328] VGAM241 is a novel bioinformatically detected regulatory, non protein coding, viral micro RNA (miRNA) gene. The method by which VGAM241 was detected is described hereinabove with reference to FIGS. 2-8.

[3329] VGAM241 gene, herein designated VGAM GENE, is a viral gene contained in the genome of Vaccinia virus. VGAM241 host target gene, herein designated VGAM HOST TARGET GENE, is a human gene contained in the human genome.

[3330] VGAM241 gene, herein designated VGAM GENE, encodes a VGAM241 precursor RNA, herein designated VGAM PRECURSOR RNA. Similar to other miRNA genes, and unlike most ordinary genes, VGAM241 precursor RNA, herein designated VGAM PRECURSOR RNA, does not encode a protein. A nucleotide sequence identical or highly similar to the nucleotide sequence of VGAM241 precursor RNA is designated SEQ ID:227, and is provided hereinbelow with reference to the sequence listing part. Nucleotide sequence SEQ ID:227 is located at position 130612 relative to the genome of Vaccinia virus.

[3331] VGAM241 precursor RNA, herein designated VGAM PRECURSOR RNA, folds onto itself, forming VGAM241 folded precursor RNA, herein designated VGAM FOLDED PRECURSOR RNA, which has a two-dimensional hairpin structure. As is well known in the art, this hairpin structure, is typical of RNA encoded by miRNA genes, and is due to the fact that the nucleotide sequence of the first half of the RNA encoded by a miRNA gene is an accurate or partial inversed-reversed sequence of the nucleotide sequence of the second half thereof.

[3332] An enzyme complex designated DICER COMPLEX, dices the VGAM241 folded precursor RNA, herein designated VGAM FOLDED PRECURSOR RNA, into VGAM241 RNA, herein designated VGAM RNA, a single stranded ˜22 nt long RNA segment. As is known in the art, dicing of a hairpin structured RNA precursor product into a short ˜22 nt RNA segment is catalyzed by an enzyme complex comprising an enzyme called Dicer together with other necessary proteins. A probable (over 82%) nucleotide sequence of VGAM241 RNA is designated SEQ ID:576, and is provided hereinbelow with reference to the sequence listing part.

[3333] VGAM241 host target gene, herein designated VGAM HOST TARGET GENE, encodes a corresponding messenger RNA, VGAM241 host target RNA, herein designated VGAM HOST TARGET RNA. VGAM241 host target RNA, herein designated VGAM HOST TARGET RNA, comprises three regions, as is typical of mRNA of a protein coding gene: a 5 untranslated region, a protein coding region and a 3 untranslated region, designated 5UTR, PROTEIN CODING and 3UTR respectively.

[3334] VGAM241 RNA, herein designated VGAM RNA, binds complementarily to one or more host target binding sites located in untranslated regions of VGAM241 host target RNA, herein designated VGAM HOST TARGET RNA. This complementary binding is due to the fact that the nucleotide sequence of VGAM241 RNA, herein designated VGAM RNA, is an accurate or a partial inversed-reversed sequence of the nucleotide sequence of each of the host target binding sites. As an illustration, FIG. 1 shows 3 such host target binding sites, designated BINDING SITE I, BINDING SITE II and BINDING SITE III respectively. It is appreciated that the number of host target binding sites shown in FIG. 1 is meant as an illustration only, and is not meant to be limiting VGAM241 RNA, herein designated VGAM RNA, may have a different number of host target binding sites in untranslated regions of a VGAM241 host target RNA, herein designated VGAM HOST TARGET RNA. It is further appreciated that while FIG. 1 depicts host target binding sites in the 3UTR region, this is meant as an example only these host target binding sites may be located in the 3UTR region, the 5UTR region, or in both 3UTR and 5UTR regions.

[3335] The complementary binding of VGAM241 RNA, herein designated VGAM RNA, to host target binding sites on VGAM241 host target RNA, herein designated VGAM HOST TARGET RNA, such as BINDING SITE I, BINDING SITE II and BINDING SITE III, inhibits translation of VGAM241 host target RNA, herein designated VGAM HOST TARGET RNA, into VGAM241 host target protein, herein designated VGAM HOST TARGET PROTEIN. VGAM host target protein is therefore outlined by a broken line.

[3336] It is appreciated that VGAM241 host target gene, herein designated VGAM HOST TARGET GENE, in fact represents a plurality of VGAM241 host target genes. The mRNA of each one of this plurality of VGAM241 host target genes comprises one or more host target binding sites, each having a nucleotide sequence which is at least partly complementary to VGAM241 RNA, herein designated VGAM RNA, and which when bound by VGAM241 RNA, herein designated VGAM RNA, causes inhibition of translation of respective one or more VGAM241 host target proteins.

[3337] It is further appreciated by one skilled in the art that the mode of translational inhibition illustrated by FIG. 1 with specific reference to translational inhibition exerted by VGAM241 gene, herein designated VGAM GENE, on one or more VGAM241 host target gene, herein designated VGAM HOST TARGET GENE, is in fact common to other known non-viral miRNA genes. As mentioned hereinabove with reference to the background section, although a specific complementary binding site has been demonstrated only for some of the known miRNA genes (primarily Lin-4 and Let-7), all other recently discovered miRNA genes are also believed by those skilled in the art to modulate expression of other genes by complementary binding, although specific complementary binding sites of these other miRNA genes have not yet been found (Ruvkun G., Perspective: Glimpses of a tiny RNA world, Science 294, 779 (2001)).

[3338] It is yet further appreciated that a function of VGAM241 is inhibition of expression of host target genes, as part of a novel viral mechanism of attacking a host. Accordingly, utilities of VGAM241 include diagnosis, prevention and treatment of viral infection by Vaccinia virus. Specific functions, and accordingly utilities, of VGAM241 correlate with, and may be deduced from, the identity of the host target genes which VGAM241 binds and inhibits, and the function of these host target genes, as elaborated hereinbelow.

[3339] Nucleotide sequences of the VGAM241 precursor RNA, herein designated VGAM PRECURSOR RNA, and of the diced VGAM241 RNA, herein designated VGAM RNA, and a schematic representation of the secondary folding of VGAM241 folded precursor RNA, herein designated VGAM FOLDED PRECURSOR RNA, of VGAM241 are further described hereinbelow with reference to Table 1.

[3340] Nucleotide sequences of host target binding sites, such as BINDING SITE-I, BINDING SITE-II and BINDING SITE-III of FIG. 1, found on, and schematic representation of the complementarity of each of these host target binding sites to VGAM241 RNA, herein designated VGAM RNA, are described hereinbelow with reference to Table 2.

[3341] FIG. 1 further provides a conceptual description of another novel bioinformatically detected viral gene of the present invention, referred to here as Viral Genomic Address Messenger 242 (VGAM242) viral gene, which modulates expression of respective host target genes thereof, the function and utility of which host target genes is known in the art.

[3342] VGAM242 is a novel bioinformatically detected regulatory, non protein coding, viral micro RNA (miRNA) gene. The method by which VGAM242 was detected is described hereinabove with reference to FIGS. 2-8.

[3343] VGAM242 gene, herein designated VGAM GENE, is a viral gene contained in the genome of Vaccinia virus. VGAM242 host target gene, herein designated VGAM HOST TARGET GENE, is a human gene contained in the human genome.

[3344] VGAM242 gene, herein designated VGAM GENE, encodes a VGAM242 precursor RNA, herein designated VGAM PRECURSOR RNA. Similar to other miRNA genes, and unlike most ordinary genes, VGAM242 precursor RNA, herein designated VGAM PRECURSOR RNA, does not encode a protein. A nucleotide sequence identical or highly similar to the nucleotide sequence of VGAM242 precursor RNA is designated SEQ ID:228, and is provided hereinbelow with reference to the sequence listing part. Nucleotide sequence SEQ ID:228 is located at position 131407 relative to the genome of Vaccinia virus.

[3345] VGAM242 precursor RNA, herein designated VGAM PRECURSOR RNA, folds onto itself, forming VGAM242 folded precursor RNA, herein designated VGAM FOLDED PRECURSOR RNA, which has a two-dimensional hairpin structure. As is well known in the art, this hairpin structure, is typical of RNA encoded by miRNA genes, and is due to the fact that the nucleotide sequence of the first half of the RNA encoded by a miRNA gene is an accurate or partial inversed-reversed sequence of the nucleotide sequence of the second half thereof.

[3346] An enzyme complex designated DICER COMPLEX, dices the VGAM242 folded precursor RNA, herein designated VGAM FOLDED PRECURSOR RNA, into VGAM242 RNA, herein designated VGAM RNA, a single stranded ˜22 nt long RNA segment. As is known in the art, dicing of a hairpin structured RNA precursor product into a short ˜22 nt RNA segment is catalyzed by an enzyme complex comprising an enzyme called Dicer together with other necessary proteins. A probable (over 83%) nucleotide sequence of VGAM242 RNA is designated SEQ ID:577, and is provided hereinbelow with reference to the sequence listing part.

[3347] VGAM242 host target gene, herein designated VGAM HOST TARGET GENE, encodes a corresponding messenger RNA, VGAM242 host target RNA, herein designated VGAM HOST TARGET RNA. VGAM242 host target RNA, herein designated VGAM HOST TARGET RNA, comprises three regions, as is typical of mRNA of a protein coding gene: a 5 untranslated region, a protein coding region and a 3 untranslated region, designated 5UTR, PROTEIN CODING and 3UTR respectively.

[3348] VGAM242 RNA, herein designated VGAM RNA, binds complementarily to one or more host target binding sites located in untranslated regions of VGAM242 host target RNA, herein designated VGAM HOST TARGET RNA. This complementary binding is due to the fact that the nucleotide sequence of VGAM242 RNA, herein designated VGAM RNA, is an accurate or a partial inversed-reversed sequence of the nucleotide sequence of each of the host target binding sites. As an illustration, FIG. 1 shows 3 such host target binding sites, designated BINDING SITE I, BINDING SITE II and BINDING SITE III respectively. It is appreciated that the number of host target binding sites shown in FIG. 1 is meant as an illustration only, and is not meant to be limiting VGAM242 RNA, herein designated VGAM RNA, may have a different number of host target binding sites in untranslated regions of a VGAM242 host target RNA, herein designated VGAM HOST TARGET RNA. It is further appreciated that while FIG. 1 depicts host target binding sites in the 3UTR region, this is meant as an example only these host target binding sites may be located in the 3UTR region, the 5UTR region, or in both 3UTR and 5UTR regions.

[3349] The complementary binding of VGAM242 RNA, herein designated VGAM RNA, to host target binding sites on VGAM242 host target RNA, herein designated VGAM HOST TARGET RNA, such as BINDING SITE I, BINDING SITE II and BINDING SITE III, inhibits translation of VGAM242 host target RNA, herein designated VGAM HOST TARGET RNA, into VGAM242 host target protein, herein designated VGAM HOST TARGET PROTEIN. VGAM host target protein is therefore outlined by a broken line.

[3350] It is appreciated that VGAM242 host target gene, herein designated VGAM HOST TARGET GENE, in fact represents a plurality of VGAM242 host target genes. The mRNA of each one of this plurality of VGAM242 host target genes comprises one or more host target binding sites, each having a nucleotide sequence which is at least partly complementary to VGAM242 RNA, herein designated VGAM RNA, and which when bound by VGAM242 RNA, herein designated VGAM RNA, causes inhibition of translation of respective one or more VGAM242 host target proteins.

[3351] It is further appreciated by one skilled in the art that the mode of translational inhibition illustrated by FIG. 1 with specific reference to translational inhibition exerted by VGAM242 gene, herein designated VGAM GENE, on one or more VGAM242 host target gene, herein designated VGAM HOST TARGET GENE, is in fact common to other known non-viral miRNA genes. As mentioned hereinabove with reference to the background section, although a specific complementary binding site has been demonstrated only for some of the known miRNA genes (primarily Lin-4 and Let-7), all other recently discovered miRNA genes are also believed by those skilled in the art to modulate expression of other genes by complementary binding, although specific complementary binding sites of these other miRNA genes have not yet been found (Ruvkun G., Perspective: Glimpses of a tiny RNA world, Science 294, 779 (2001)).

[3352] It is yet further appreciated that a function of VGAM242 is inhibition of expression of host target genes, as part of a novel viral mechanism of attacking a host. Accordingly, utilities of VGAM242 include diagnosis, prevention and treatment of viral infection by Vaccinia virus. Specific functions, and accordingly utilities, of VGAM242 correlate with, and may be deduced from, the identity of the host target genes which VGAM242 binds and inhibits, and the function of these host target genes, as elaborated hereinbelow.

[3353] Nucleotide sequences of the VGAM242 precursor RNA, herein designated VGAM PRECURSOR RNA, and of the diced VGAM242 RNA, herein designated VGAM RNA, and a schematic representation of the secondary folding of VGAM242 folded precursor RNA, herein designated VGAM FOLDED PRECURSOR RNA, of VGAM242 are further described hereinbelow with reference to Table 1.

[3354] Nucleotide sequences of host target binding sites, such as BINDING SITE-I, BINDING SITE-II and BINDING SITE-III of FIG. 1, found on, and schematic representation of the complementarity of each of these host target binding sites to VGAM242 RNA, herein designated VGAM RNA, are described hereinbelow with reference to Table 2.

[3355] FIG. 1 further provides a conceptual description of another novel bioinformatically detected viral gene of the present invention, referred to here as Viral Genomic Address Messenger 243 (VGAM243) viral gene, which modulates expression of respective host target genes thereof, the function and utility of which host target genes is known in the art.

[3356] VGAM243 is a novel bioinformatically detected regulatory, non protein coding, viral micro RNA (miRNA) gene. The method by which VGAM243 was detected is described hereinabove with reference to FIGS. 2-8.

[3357] VGAM243 gene, herein designated VGAM GENE, is a viral gene contained in the genome of Vaccinia virus. VGAM243 host target gene, herein designated VGAM HOST TARGET GENE, is a human gene contained in the human genome.

[3358] VGAM243 gene, herein designated VGAM GENE, encodes a VGAM243 precursor RNA, herein designated VGAM PRECURSOR RNA. Similar to other miRNA genes, and unlike most ordinary genes, VGAM243 precursor RNA, herein designated VGAM PRECURSOR RNA, does not encode a protein. A nucleotide sequence identical or highly similar to the nucleotide sequence of VGAM243 precursor RNA is designated SEQ ID:229, and is provided hereinbelow with reference to the sequence listing part. Nucleotide sequence SEQ ID:229 is located at position 135663 relative to the genome of Vaccinia virus.

[3359] VGAM243 precursor RNA, herein designated VGAM PRECURSOR RNA, folds onto itself, forming VGAM243 folded precursor RNA, herein designated VGAM FOLDED PRECURSOR RNA, which has a two-dimensional hairpin structure. As is well known in the art, this hairpin structure, is typical of RNA encoded by miRNA genes, and is due to the fact that the nucleotide sequence of the first half of the RNA encoded by a miRNA gene is an accurate or partial inversed-reversed sequence of the nucleotide sequence of the second half thereof.

[3360] An enzyme complex designated DICER COMPLEX, dices the VGAM243 folded precursor RNA, herein designated VGAM FOLDED PRECURSOR RNA, into VGAM243 RNA, herein designated VGAM RNA, a single stranded ˜22 nt long RNA segment. As is known in the art, dicing of a hairpin structured RNA precursor product into a short ˜22 nt RNA segment is catalyzed by an enzyme complex comprising an enzyme called Dicer together with other necessary proteins. A probable (over 77%) nucleotide sequence of VGAM243 RNA is designated SEQ ID:578, and is provided hereinbelow with reference to the sequence listing part.

[3361] VGAM243 host target gene, herein designated VGAM HOST TARGET GENE, encodes a corresponding messenger RNA, VGAM243 host target RNA, herein designated VGAM HOST TARGET RNA. VGAM243 host target RNA, herein designated VGAM HOST TARGET RNA, comprises three regions, as is typical of mRNA of a protein coding gene: a 5 untranslated region, a protein coding region and a 3 untranslated region, designated 5UTR, PROTEIN CODING and 3UTR respectively.

[3362] VGAM243 RNA, herein designated VGAM RNA, binds complementarily to one or more host target binding sites located in untranslated regions of VGAM243 host target RNA, herein designated VGAM HOST TARGET RNA. This complementary binding is due to the fact that the nucleotide sequence of VGAM243 RNA, herein designated VGAM RNA, is an accurate or a partial inversed-reversed sequence of the nucleotide sequence of each of the host target binding sites. As an illustration, FIG. 1 shows 3 such host target binding sites, designated BINDING SITE I, BINDING SITE II and BINDING SITE III respectively. It is appreciated that the number of host target binding sites shown in FIG. 1 is meant as an illustration only, and is not meant to be limiting VGAM243 RNA, herein designated VGAM RNA, may have a different number of host target binding sites in untranslated regions of a VGAM243 host target RNA, herein designated VGAM HOST TARGET RNA. It is further appreciated that while FIG. 1 depicts host target binding sites in the 3UTR region, this is meant as an example only these host target binding sites may be located in the 3UTR region, the 5UTR region, or in both 3UTR and 5UTR regions.

[3363] The complementary binding of VGAM243 RNA, herein designated VGAM RNA, to host target binding sites on VGAM243 host target RNA, herein designated VGAM HOST TARGET RNA, such as BINDING SITE I, BINDING SITE II and BINDING SITE III, inhibits translation of VGAM243 host target RNA, herein designated VGAM HOST TARGET RNA, into VGAM243 host target protein, herein designated VGAM HOST TARGET PROTEIN. VGAM host target protein is therefore outlined by a broken line.

[3364] It is appreciated that VGAM243 host target gene, herein designated VGAM HOST TARGET GENE, in fact represents a plurality of VGAM243 host target genes. The mRNA of each one of this plurality of VGAM243 host target genes comprises one or more host target binding sites, each having a nucleotide sequence which is at least partly complementary to VGAM243 RNA, herein designated VGAM RNA, and which when bound by VGAM243 RNA, herein designated VGAM RNA, causes inhibition of translation of respective one or more VGAM243 host target proteins.

[3365] It is further appreciated by one skilled in the art that the mode of translational inhibition illustrated by FIG. 1 with specific reference to translational inhibition exerted by VGAM243 gene, herein designated VGAM GENE, on one or more VGAM243 host target gene, herein designated VGAM HOST TARGET GENE, is in fact common to other known non-viral miRNA genes. As mentioned hereinabove with reference to the background section, although a specific complementary binding site has been demonstrated only for some of the known miRNA genes (primarily Lin-4 and Let-7), all other recently discovered miRNA genes are also believed by those skilled in the art to modulate expression of other genes by complementary binding, although specific complementary binding sites of these other miRNA genes have not yet been found (Ruvkun G., Perspective: Glimpses of a tiny RNA world, Science 294, 779 (2001)).

[3366] It is yet further appreciated that a function of VGAM243 is inhibition of expression of host target genes, as part of a novel viral mechanism of attacking a host. Accordingly, utilities of VGAM243 include diagnosis, prevention and treatment of viral infection by Vaccinia virus. Specific functions, and accordingly utilities, of VGAM243 correlate with, and may be deduced from, the identity of the host target genes which VGAM243 binds and inhibits, and the function of these host target genes, as elaborated hereinbelow.

[3367] Nucleotide sequences of the VGAM243 precursor RNA, herein designated VGAM PRECURSOR RNA, and of the diced VGAM243 RNA, herein designated VGAM RNA, and a schematic representation of the secondary folding of VGAM243 folded precursor RNA, herein designated VGAM FOLDED PRECURSOR RNA, of VGAM243 are further described hereinbelow with reference to Table 1.

[3368] Nucleotide sequences of host target binding sites, such as BINDING SITE-I, BINDING SITE-II and BINDING SITE-III of FIG. 1, found on, and schematic representation of the complementarity of each of these host target binding sites to VGAM243 RNA, herein designated VGAM RNA, are described hereinbelow with reference to Table 2.

[3369] FIG. 1 further provides a conceptual description of another novel bioinformatically detected viral gene of the present invention, referred to here as Viral Genomic Address Messenger 244 (VGAM244) viral gene, which modulates expression of respective host target genes thereof, the function and utility of which host target genes is known in the art.

[3370] VGAM244 is a novel bioinformatically detected regulatory, non protein coding, viral micro RNA (miRNA) gene. The method by which VGAM244 was detected is described hereinabove with reference to FIGS. 2-8.

[3371] VGAM244 gene, herein designated VGAM GENE, is a viral gene contained in the genome of Vaccinia virus. VGAM244 host target gene, herein designated VGAM HOST TARGET GENE, is a human gene contained in the human genome.

[3372] VGAM244 gene, herein designated VGAM GENE, encodes a VGAM244 precursor RNA, herein designated VGAM PRECURSOR RNA. Similar to other miRNA genes, and unlike most ordinary genes, VGAM244 precursor RNA, herein designated VGAM PRECURSOR RNA, does not encode a protein. A nucleotide sequence identical or highly similar to the nucleotide sequence of VGAM244 precursor RNA is designated SEQ ID:230, and is provided hereinbelow with reference to the sequence listing part. Nucleotide sequence SEQ ID:230 is located at position 134932 relative to the genome of Vaccinia virus.

[3373] VGAM244 precursor RNA, herein designated VGAM PRECURSOR RNA, folds onto itself, forming VGAM244 folded precursor RNA, herein designated VGAM FOLDED PRECURSOR RNA, which has a two-dimensional hairpin structure. As is well known in the art, this hairpin structure, is typical of RNA encoded by miRNA genes, and is due to the fact that the nucleotide sequence of the first half of the RNA encoded by a miRNA gene is an accurate or partial inversed-reversed sequence of the nucleotide sequence of the second half thereof.

[3374] An enzyme complex designated DICER COMPLEX, dices the VGAM244 folded precursor RNA, herein designated VGAM FOLDED PRECURSOR RNA, into VGAM244 RNA, herein designated VGAM RNA, a single stranded ˜22 nt long RNA segment. As is known in the art, dicing of a hairpin structured RNA precursor product into a short ˜22 nt RNA segment is catalyzed by an enzyme complex comprising an enzyme called Dicer together with other necessary proteins. A probable (over 91%) nucleotide sequence of VGAM244 RNA is designated SEQ ID:579, and is provided hereinbelow with reference to the sequence listing part.

[3375] VGAM244 host target gene, herein designated VGAM HOST TARGET GENE, encodes a corresponding messenger RNA, VGAM244 host target RNA, herein designated VGAM HOST TARGET RNA. VGAM244 host target RNA, herein designated VGAM HOST TARGET RNA, comprises three regions, as is typical of mRNA of a protein coding gene: a 5 untranslated region, a protein coding region and a 3 untranslated region, designated 5UTR, PROTEIN CODING and 3UTR respectively.

[3376] VGAM244 RNA, herein designated VGAM RNA, binds complementarily to one or more host target binding sites located in untranslated regions of VGAM244 host target RNA, herein designated VGAM HOST TARGET RNA. This complementary binding is due to the fact that the nucleotide sequence of VGAM244 RNA, herein designated VGAM RNA, is an accurate or a partial inversed-reversed sequence of the nucleotide sequence of each of the host target binding sites. As an illustration, FIG. 1 shows 3 such host target binding sites, designated BINDING SITE I, BINDING SITE II and BINDING SITE III respectively. It is appreciated that the number of host target binding sites shown in FIG. 1 is meant as an illustration only, and is not meant to be limiting VGAM244 RNA, herein designated VGAM RNA, may have a different number of host target binding sites in untranslated regions of a VGAM244 host target RNA, herein designated VGAM HOST TARGET RNA. It is further appreciated that while FIG. 1 depicts host target binding sites in the 3UTR region, this is meant as an example only these host target binding sites may be located in the 3UTR region, the 5UTR region, or in both 3UTR and 5UTR regions.

[3377] The complementary binding of VGAM244 RNA, herein designated VGAM RNA, to host target binding sites on VGAM244 host target RNA, herein designated VGAM HOST TARGET RNA, such as BINDING SITE I, BINDING SITE II and BINDING SITE III, inhibits translation of VGAM244 host target RNA, herein designated VGAM HOST TARGET RNA, into VGAM244 host target protein, herein designated VGAM HOST TARGET PROTEIN. VGAM host target protein is therefore outlined by a broken line.

[3378] It is appreciated that VGAM244 host target gene, herein designated VGAM HOST TARGET GENE, in fact represents a plurality of VGAM244 host target genes. The mRNA of each one of this plurality of VGAM244 host target genes comprises one or more host target binding sites, each having a nucleotide sequence which is at least partly complementary to VGAM244 RNA, herein designated VGAM RNA, and which when bound by VGAM244 RNA, herein designated VGAM RNA, causes inhibition of translation of respective one or more VGAM244 host target proteins.

[3379] It is further appreciated by one skilled in the art that the mode of translational inhibition illustrated by FIG. 1 with specific reference to translational inhibition exerted by VGAM244 gene, herein designated VGAM GENE, on one or more VGAM244 host target gene, herein designated VGAM HOST TARGET GENE, is in fact common to other known non-viral miRNA genes. As mentioned hereinabove with reference to the background section, although a specific complementary binding site has been demonstrated only for some of the known miRNA genes (primarily Lin-4 and Let-7), all other recently discovered miRNA genes are also believed by those skilled in the art to modulate expression of other genes by complementary binding, although specific complementary binding sites of these other miRNA genes have not yet been found (Ruvkun G., Perspective: Glimpses of a tiny RNA world, Science 294, 779 (2001)).

[3380] It is yet further appreciated that a function of VGAM244 is inhibition of expression of host target genes, as part of a novel viral mechanism of attacking a host. Accordingly, utilities of VGAM244 include diagnosis, prevention and treatment of viral infection by Vaccinia virus. Specific functions, and accordingly utilities, of VGAM244 correlate with, and may be deduced from, the identity of the host target genes which VGAM244 binds and inhibits, and the function of these host target genes, as elaborated hereinbelow.

[3381] Nucleotide sequences of the VGAM244 precursor RNA, herein designated VGAM PRECURSOR RNA, and of the diced VGAM244 RNA, herein designated VGAM RNA, and a schematic representation of the secondary folding of VGAM244 folded precursor RNA, herein designated VGAM FOLDED PRECURSOR RNA, of VGAM244 are further described hereinbelow with reference to Table 1.

[3382] Nucleotide sequences of host target binding sites, such as BINDING SITE-I, BINDING SITE-II and BINDING SITE-III of FIG. 1, found on, and schematic representation of the complementarity of each of these host target binding sites to VGAM244 RNA, herein designated VGAM RNA, are described hereinbelow with reference to Table 2.

[3383] FIG. 1 further provides a conceptual description of another novel bioinformatically detected viral gene of the present invention, referred to here as Viral Genomic Address Messenger 245 (VGAM245) viral gene, which modulates expression of respective host target genes thereof, the function and utility of which host target genes is known in the art.

[3384] VGAM245 is a novel bioinformatically detected regulatory, non protein coding, viral micro RNA (miRNA) gene. The method by which VGAM245 was detected is described hereinabove with reference to FIGS. 2-8.

[3385] VGAM245 gene, herein designated VGAM GENE, is a viral gene contained in the genome of Vaccinia virus. VGAM245 host target gene, herein designated VGAM HOST TARGET GENE, is a human gene contained in the human genome.

[3386] VGAM245 gene, herein designated VGAM GENE, encodes a VGAM245 precursor RNA, herein designated VGAM PRECURSOR RNA. Similar to other miRNA genes, and unlike most ordinary genes, VGAM245 precursor RNA, herein designated VGAM PRECURSOR RNA, does not encode a protein. A nucleotide sequence identical or highly similar to the nucleotide sequence of VGAM245 precursor RNA is designated SEQ ID:231, and is provided hereinbelow with reference to the sequence listing part. Nucleotide sequence SEQ ID:231 is located at position 133924 relative to the genome of Vaccinia virus.

[3387] VGAM245 precursor RNA, herein designated VGAM PRECURSOR RNA, folds onto itself, forming VGAM245 folded precursor RNA, herein designated VGAM FOLDED PRECURSOR RNA, which has a two-dimensional hairpin structure. As is well known in the art, this hairpin structure, is typical of RNA encoded by miRNA genes, and is due to the fact that the nucleotide sequence of the first half of the RNA encoded by a miRNA gene is an accurate or partial inversed-reversed sequence of the nucleotide sequence of the second half thereof.

[3388] An enzyme complex designated DICER COMPLEX, dices the VGAM245 folded precursor RNA, herein designated VGAM FOLDED PRECURSOR RNA, into VGAM245 RNA, herein designated VGAM RNA, a single stranded ˜22 nt long RNA segment. As is known in the art, dicing of a hairpin structured RNA precursor product into a short ˜22 nt RNA segment is catalyzed by an enzyme complex comprising an enzyme called Dicer together with other necessary proteins. A probable (over 87%) nucleotide sequence of VGAM245 RNA is designated SEQ ID:580, and is provided hereinbelow with reference to the sequence listing part.

[3389] VGAM245 host target gene, herein designated VGAM HOST TARGET GENE, encodes a corresponding messenger RNA, VGAM245 host target RNA, herein designated VGAM HOST TARGET RNA. VGAM245 host target RNA, herein designated VGAM HOST TARGET RNA, comprises three regions, as is typical of mRNA of a protein coding gene: a 5 untranslated region, a protein coding region and a 3 untranslated region, designated 5UTR, PROTEIN CODING and 3UTR respectively.

[3390] VGAM245 RNA, herein designated VGAM RNA, binds complementarily to one or more host target binding sites located in untranslated regions of VGAM245 host target RNA, herein designated VGAM HOST TARGET RNA. This complementary binding is due to the fact that the nucleotide sequence of VGAM245 RNA, herein designated VGAM RNA, is an accurate or a partial inversed-reversed sequence of the nucleotide sequence of each of the host target binding sites. As an illustration, FIG. 1 shows 3 such host target binding sites, designated BINDING SITE I, BINDING SITE II and BINDING SITE III respectively. It is appreciated that the number of host target binding sites shown in FIG. 1 is meant as an illustration only, and is not meant to be limiting VGAM245 RNA, herein designated VGAM RNA, may have a different number of host target binding sites in untranslated regions of a VGAM245 host target RNA, herein designated VGAM HOST TARGET RNA. It is further appreciated that while FIG. 1 depicts host target binding sites in the 3UTR region, this is meant as an example only these host target binding sites may be located in the 3UTR region, the 5UTR region, or in both 3UTR and 5UTR regions.

[3391] The complementary binding of VGAM245 RNA, herein designated VGAM RNA, to host target binding sites on VGAM245 host target RNA, herein designated VGAM HOST TARGET RNA, such as BINDING SITE I, BINDING SITE II and BINDING SITE III, inhibits translation of VGAM245 host target RNA, herein designated VGAM HOST TARGET RNA, into VGAM245 host target protein, herein designated VGAM HOST TARGET PROTEIN. VGAM host target protein is therefore outlined by a broken line.

[3392] It is appreciated that VGAM245 host target gene, herein designated VGAM HOST TARGET GENE, in fact represents a plurality of VGAM245 host target genes. The mRNA of each one of this plurality of VGAM245 host target genes comprises one or more host target binding sites, each having a nucleotide sequence which is at least partly complementary to VGAM245 RNA, herein designated VGAM RNA, and which when bound by VGAM245 RNA, herein designated VGAM RNA, causes inhibition of translation of respective one or more VGAM245 host target proteins.

[3393] It is further appreciated by one skilled in the art that the mode of translational inhibition illustrated by FIG. 1 with specific reference to translational inhibition exerted by VGAM245 gene, herein designated VGAM GENE, on one or more VGAM245 host target gene, herein designated VGAM HOST TARGET GENE, is in fact common to other known non-viral miRNA genes. As mentioned hereinabove with reference to the background section, although a specific complementary binding site has been demonstrated only for some of the known miRNA genes (primarily Lin-4 and Let-7), all other recently discovered miRNA genes are also believed by those skilled in the art to modulate expression of other genes by complementary binding, although specific complementary binding sites of these other miRNA genes have not yet been found (Ruvkun G., Perspective: Glimpses of a tiny RNA world, Science 294, 779 (2001)).

[3394] It is yet further appreciated that a function of VGAM245 is inhibition of expression of host target genes, as part of a novel viral mechanism of attacking a host. Accordingly, utilities of VGAM245 include diagnosis, prevention and treatment of viral infection by Vaccinia virus. Specific functions, and accordingly utilities, of VGAM245 correlate with, and may be deduced from, the identity of the host target genes which VGAM245 binds and inhibits, and the function of these host target genes, as elaborated hereinbelow.

[3395] Nucleotide sequences of the VGAM245 precursor RNA, herein designated VGAM PRECURSOR RNA, and of the diced VGAM245 RNA, herein designated VGAM RNA, and a schematic representation of the secondary folding of VGAM245 folded precursor RNA, herein designated VGAM FOLDED PRECURSOR RNA, of VGAM245 are further described hereinbelow with reference to Table 1.

[3396] Nucleotide sequences of host target binding sites, such as BINDING SITE-I, BINDING SITE-II and BINDING SITE-III of FIG. 1, found on, and schematic representation of the complementarity of each of these host target binding sites to VGAM245 RNA, herein designated VGAM RNA, are described hereinbelow with reference to Table 2.

[3397] FIG. 1 further provides a conceptual description of another novel bioinformatically detected viral gene of the present invention, referred to here as Viral Genomic Address Messenger 246 (VGAM246) viral gene, which modulates expression of respective host target genes thereof, the function and utility of which host target genes is known in the art.

[3398] VGAM246 is a novel bioinformatically detected regulatory, non protein coding, viral micro RNA (miRNA) gene. The method by which VGAM246 was detected is described hereinabove with reference to FIGS. 2-8.

[3399] VGAM246 gene, herein designated VGAM GENE, is a viral gene contained in the genome of Vaccinia virus. VGAM246 host target gene, herein designated VGAM HOST TARGET GENE, is a human gene contained in the human genome.

[3400] VGAM246 gene, herein designated VGAM GENE, encodes a VGAM246 precursor RNA, herein designated VGAM PRECURSOR RNA. Similar to other miRNA genes, and unlike most ordinary genes, VGAM246 precursor RNA, herein designated VGAM PRECURSOR RNA, does not encode a protein. A nucleotide sequence identical or highly similar to the nucleotide sequence of VGAM246 precursor RNA is designated SEQ ID:232, and is provided hereinbelow with reference to the sequence listing part. Nucleotide sequence SEQ ID:232 is located at position 136295 relative to the genome of Vaccinia virus.

[3401] VGAM246 precursor RNA, herein designated VGAM PRECURSOR RNA, folds onto itself, forming VGAM246 folded precursor RNA, herein designated VGAM FOLDED PRECURSOR RNA, which has a two-dimensional hairpin structure. As is well known in the art, this hairpin structure, is typical of RNA encoded by miRNA genes, and is due to the fact that the nucleotide sequence of the first half of the RNA encoded by a miRNA gene is an accurate or partial inversed-reversed sequence of the nucleotide sequence of the second half thereof.

[3402] An enzyme complex designated DICER COMPLEX, dices the VGAM246 folded precursor RNA, herein designated VGAM FOLDED PRECURSOR RNA, into VGAM246 RNA, herein designated VGAM RNA, a single stranded ˜22 nt long RNA segment. As is known in the art, dicing of a hairpin structured RNA precursor product into a short ˜22 nt RNA segment is catalyzed by an enzyme complex comprising an enzyme called Dicer together with other necessary proteins. A probable (over 78%) nucleotide sequence of VGAM246 RNA is designated SEQ ID:581, and is provided hereinbelow with reference to the sequence listing part.

[3403] VGAM246 host target gene, herein designated VGAM HOST TARGET GENE, encodes a corresponding messenger RNA, VGAM246 host target RNA, herein designated VGAM HOST TARGET RNA. VGAM246 host target RNA, herein designated VGAM HOST TARGET RNA, comprises three regions, as is typical of mRNA of a protein coding gene: a 5 untranslated region, a protein coding region and a 3 untranslated region, designated 5UTR, PROTEIN CODING and 3UTR respectively.

[3404] VGAM246 RNA, herein designated VGAM RNA, binds complementarily to one or more host target binding sites located in untranslated regions of VGAM246 host target RNA, herein designated VGAM HOST TARGET RNA. This complementary binding is due to the fact that the nucleotide sequence of VGAM246 RNA, herein designated VGAM RNA, is an accurate or a partial inversed-reversed sequence of the nucleotide sequence of each of the host target binding sites. As an illustration, FIG. 1 shows 3 such host target binding sites, designated BINDING SITE I, BINDING SITE II and BINDING SITE III respectively. It is appreciated that the number of host target binding sites shown in FIG. 1 is meant as an illustration only, and is not meant to be limiting VGAM246 RNA, herein designated VGAM RNA, may have a different number of host target binding sites in untranslated regions of a VGAM246 host target RNA, herein designated VGAM HOST TARGET RNA. It is further appreciated that while FIG. 1 depicts host target binding sites in the 3UTR region, this is meant as an example only these host target binding sites may be located in the 3UTR region, the 5UTR region, or in both 3UTR and 5UTR regions.

[3405] The complementary binding of VGAM246 RNA, herein designated VGAM RNA, to host target binding sites on VGAM246 host target RNA, herein designated VGAM HOST TARGET RNA, such as BINDING SITE I, BINDING SITE II and BINDING SITE III, inhibits translation of VGAM246 host target RNA, herein designated VGAM HOST TARGET RNA, into VGAM246 host target protein, herein designated VGAM HOST TARGET PROTEIN. VGAM host target protein is therefore outlined by a broken line.

[3406] It is appreciated that VGAM246 host target gene, herein designated VGAM HOST TARGET GENE, in fact represents a plurality of VGAM246 host target genes. The mRNA of each one of this plurality of VGAM246 host target genes comprises one or more host target binding sites, each having a nucleotide sequence which is at least partly complementary to VGAM246 RNA, herein designated VGAM RNA, and which when bound by VGAM246 RNA, herein designated VGAM RNA, causes inhibition of translation of respective one or more VGAM246 host target proteins.

[3407] It is further appreciated by one skilled in the art that the mode of translational inhibition illustrated by FIG. 1 with specific reference to translational inhibition exerted by VGAM246 gene, herein designated VGAM GENE, on one or more VGAM246 host target gene, herein designated VGAM HOST TARGET GENE, is in fact common to other known non-viral miRNA genes. As mentioned hereinabove with reference to the background section, although a specific complementary binding site has been demonstrated only for some of the known miRNA genes (primarily Lin-4 and Let-7), all other recently discovered miRNA genes are also believed by those skilled in the art to modulate expression of other genes by complementary binding, although specific complementary binding sites of these other miRNA genes have not yet been found (Ruvkun G., Perspective: Glimpses of a tiny RNA world, Science 294, 779 (2001)).

[3408] It is yet further appreciated that a function of VGAM246 is inhibition of expression of host target genes, as part of a novel viral mechanism of attacking a host. Accordingly, utilities of VGAM246 include diagnosis, prevention and treatment of viral infection by Vaccinia virus. Specific functions, and accordingly utilities, of VGAM246 correlate with, and may be deduced from, the identity of the host target genes which VGAM246 binds and inhibits, and the function of these host target genes, as elaborated hereinbelow.

[3409] Nucleotide sequences of the VGAM246 precursor RNA, herein designated VGAM PRECURSOR RNA, and of the diced VGAM246 RNA, herein designated VGAM RNA, and a schematic representation of the secondary folding of VGAM246 folded precursor RNA, herein designated VGAM FOLDED PRECURSOR RNA, of VGAM246 are further described hereinbelow with reference to Table 1.

[3410] Nucleotide sequences of host target binding sites, such as BINDING SITE-I, BINDING SITE-II and BINDING SITE-III of FIG. 1, found on, and schematic representation of the complementarity of each of these host target binding sites to VGAM246 RNA, herein designated VGAM RNA, are described hereinbelow with reference to Table 2.

[3411] FIG. 1 further provides a conceptual description of another novel bioinformatically detected viral gene of the present invention, referred to here as Viral Genomic Address Messenger 247 (VGAM247) viral gene, which modulates expression of respective host target genes thereof, the function and utility of which host target genes is known in the art.

[3412] VGAM247 is a novel bioinformatically detected regulatory, non protein coding, viral micro RNA (miRNA) gene. The method by which VGAM247 was detected is described hereinabove with reference to FIGS. 2-8.

[3413] VGAM247 gene, herein designated VGAM GENE, is a viral gene contained in the genome of Vaccinia virus. VGAM247 host target gene, herein designated VGAM HOST TARGET GENE, is a human gene contained in the human genome.

[3414] VGAM247 gene, herein designated VGAM GENE, encodes a VGAM247 precursor RNA, herein designated VGAM PRECURSOR RNA. Similar to other miRNA genes, and unlike most ordinary genes, VGAM247 precursor RNA, herein designated VGAM PRECURSOR RNA, does not encode a protein. A nucleotide sequence identical or highly similar to the nucleotide sequence of VGAM247 precursor RNA is designated SEQ ID:233, and is provided hereinbelow with reference to the sequence listing part. Nucleotide sequence SEQ ID:233 is located at position 138880 relative to the genome of Vaccinia virus.

[3415] VGAM247 precursor RNA, herein designated VGAM PRECURSOR RNA, folds onto itself, forming VGAM247 folded precursor RNA, herein designated VGAM FOLDED PRECURSOR RNA, which has a two-dimensional hairpin structure. As is well known in the art, this hairpin structure, is typical of RNA encoded by miRNA genes, and is due to the fact that the nucleotide sequence of the first half of the RNA encoded by a miRNA gene is an accurate or partial inversed-reversed sequence of the nucleotide sequence of the second half thereof.

[3416] An enzyme complex designated DICER COMPLEX, dices the VGAM247 folded precursor RNA, herein designated VGAM FOLDED PRECURSOR RNA, into VGAM247 RNA, herein designated VGAM RNA, a single stranded ˜22 nt long RNA segment. As is known in the art, dicing of a hairpin structured RNA precursor product into a short ˜22 nt RNA segment is catalyzed by an enzyme complex comprising an enzyme called Dicer together with other necessary proteins. A probable (over 77%) nucleotide sequence of VGAM247 RNA is designated SEQ ID:582, and is provided hereinbelow with reference to the sequence listing part.

[3417] VGAM247 host target gene, herein designated VGAM HOST TARGET GENE, encodes a corresponding messenger RNA, VGAM247 host target RNA, herein designated VGAM HOST TARGET RNA. VGAM247 host target RNA, herein designated VGAM HOST TARGET RNA, comprises three regions, as is typical of mRNA of a protein coding gene: a 5 untranslated region, a protein coding region and a 3 untranslated region, designated 5UTR, PROTEIN CODING and 3UTR respectively.

[3418] VGAM247 RNA, herein designated VGAM RNA, binds complementarily to one or more host target binding sites located in untranslated regions of VGAM247 host target RNA, herein designated VGAM HOST TARGET RNA. This complementary binding is due to the fact that the nucleotide sequence of VGAM247 RNA, herein designated VGAM RNA, is an accurate or a partial inversed-reversed sequence of the nucleotide sequence of each of the host target binding sites. As an illustration, FIG. 1 shows 3 such host target binding sites, designated BINDING SITE I, BINDING SITE II and BINDING SITE III respectively. It is appreciated that the number of host target binding sites shown in FIG. 1 is meant as an illustration only, and is not meant to be limiting VGAM247 RNA, herein designated VGAM RNA, may have a different number of host target binding sites in untranslated regions of a VGAM247 host target RNA, herein designated VGAM HOST TARGET RNA. It is further appreciated that while FIG. 1 depicts host target binding sites in the 3UTR region, this is meant as an example only these host target binding sites may be located in the 3UTR region, the 5UTR region, or in both 3UTR and 5UTR regions.

[3419] The complementary binding of VGAM247 RNA, herein designated VGAM RNA, to host target binding sites on VGAM247 host target RNA, herein designated VGAM HOST TARGET RNA, such as BINDING SITE I, BINDING SITE II and BINDING SITE III, inhibits translation of VGAM247 host target RNA, herein designated VGAM HOST TARGET RNA, into VGAM247 host target protein, herein designated VGAM HOST TARGET PROTEIN. VGAM host target protein is therefore outlined by a broken line.

[3420] It is appreciated that VGAM247 host target gene, herein designated VGAM HOST TARGET GENE, in fact represents a plurality of VGAM247 host target genes. The mRNA of each one of this plurality of VGAM247 host target genes comprises one or more host target binding sites, each having a nucleotide sequence which is at least partly complementary to VGAM247 RNA, herein designated VGAM RNA, and which when bound by VGAM247 RNA, herein designated VGAM RNA, causes inhibition of translation of respective one or more VGAM247 host target proteins.

[3421] It is further appreciated by one skilled in the art that the mode of translational inhibition illustrated by FIG. 1 with specific reference to translational inhibition exerted by VGAM247 gene, herein designated VGAM GENE, on one or more VGAM247 host target gene, herein designated VGAM HOST TARGET GENE, is in fact common to other known non-viral miRNA genes. As mentioned hereinabove with reference to the background section, although a specific complementary binding site has been demonstrated only for some of the known miRNA genes (primarily Lin-4 and Let-7), all other recently discovered miRNA genes are also believed by those skilled in the art to modulate expression of other genes by complementary binding, although specific complementary binding sites of these other miRNA genes have not yet been found (Ruvkun G., Perspective: Glimpses of a tiny RNA world, Science 294, 779 (2001)).

[3422] It is yet further appreciated that a function of VGAM247 is inhibition of expression of host target genes, as part of a novel viral mechanism of attacking a host. Accordingly, utilities of VGAM247 include diagnosis, prevention and treatment of viral infection by Vaccinia virus. Specific functions, and accordingly utilities, of VGAM247 correlate with, and may be deduced from, the identity of the host target genes which VGAM247 binds and inhibits, and the function of these host target genes, as elaborated hereinbelow.

[3423] Nucleotide sequences of the VGAM247 precursor RNA, herein designated VGAM PRECURSOR RNA, and of the diced VGAM247 RNA, herein designated VGAM RNA, and a schematic representation of the secondary folding of VGAM247 folded precursor RNA, herein designated VGAM FOLDED PRECURSOR RNA, of VGAM247 are further described hereinbelow with reference to Table 1.

[3424] Nucleotide sequences of host target binding sites, such as BINDING SITE-I, BINDING SITE-II and BINDING SITE-III of FIG. 1, found on, and schematic representation of the complementarity of each of these host target binding sites to VGAM247 RNA, herein designated VGAM RNA, are described hereinbelow with reference to Table 2.

[3425] FIG. 1 further provides a conceptual description of another novel bioinformatically detected viral gene of the present invention, referred to here as Viral Genomic Address Messenger 248 (VGAM248) viral gene, which modulates expression of respective host target genes thereof, the function and utility of which host target genes is known in the art.

[3426] VGAM248 is a novel bioinformatically detected regulatory, non protein coding, viral micro RNA (miRNA) gene. The method by which VGAM248 was detected is described hereinabove with reference to FIGS. 2-8.

[3427] VGAM248 gene, herein designated VGAM GENE, is a viral gene contained in the genome of Vaccinia virus. VGAM248 host target gene, herein designated VGAM HOST TARGET GENE, is a human gene contained in the human genome.

[3428] VGAM248 gene, herein designated VGAM GENE, encodes a VGAM248 precursor RNA, herein designated VGAM PRECURSOR RNA. Similar to other miRNA genes, and unlike most ordinary genes, VGAM248 precursor RNA, herein designated VGAM PRECURSOR RNA, does not encode a protein. A nucleotide sequence identical or highly similar to the nucleotide sequence of VGAM248 precursor RNA is designated SEQ ID:234, and is provided hereinbelow with reference to the sequence listing part. Nucleotide sequence SEQ ID:234 is located at position 138729 relative to the genome of Vaccinia virus.

[3429] VGAM248 precursor RNA, herein designated VGAM PRECURSOR RNA, folds onto itself, forming VGAM248 folded precursor RNA, herein designated VGAM FOLDED PRECURSOR RNA, which has a two-dimensional hairpin structure. As is well known in the art, this hairpin structure, is typical of RNA encoded by miRNA genes, and is due to the fact that the nucleotide sequence of the first half of the RNA encoded by a miRNA gene is an accurate or partial inversed-reversed sequence of the nucleotide sequence of the second half thereof.

[3430] An enzyme complex designated DICER COMPLEX, dices the VGAM248 folded precursor RNA, herein designated VGAM FOLDED PRECURSOR RNA, into VGAM248 RNA, herein designated VGAM RNA, a single stranded ˜22 nt long RNA segment. As is known in the art, dicing of a hairpin structured RNA precursor product into a short ˜22 nt RNA segment is catalyzed by an enzyme complex comprising an enzyme called Dicer together with other necessary proteins. A probable (over 86%) nucleotide sequence of VGAM248 RNA is designated SEQ ID:583, and is provided hereinbelow with reference to the sequence listing part.

[3431] VGAM248 host target gene, herein designated VGAM HOST TARGET GENE, encodes a corresponding messenger RNA, VGAM248 host target RNA, herein designated VGAM HOST TARGET RNA. VGAM248 host target RNA, herein designated VGAM HOST TARGET RNA, comprises three regions, as is typical of mRNA of a protein coding gene: a 5 untranslated region, a protein coding region and a 3 untranslated region, designated 5UTR, PROTEIN CODING and 3UTR respectively.

[3432] VGAM248 RNA, herein designated VGAM RNA, binds complementarily to one or more host target binding sites located in untranslated regions of VGAM248 host target RNA, herein designated VGAM HOST TARGET RNA. This complementary binding is due to the fact that the nucleotide sequence of VGAM248 RNA, herein designated VGAM RNA, is an accurate or a partial inversed-reversed sequence of the nucleotide sequence of each of the host target binding sites. As an illustration, FIG. 1 shows 3 such host target binding sites, designated BINDING SITE I, BINDING SITE II and BINDING SITE III respectively. It is appreciated that the number of host target binding sites shown in FIG. 1 is meant as an illustration only, and is not meant to be limiting VGAM248 RNA, herein designated VGAM RNA, may have a different number of host target binding sites in untranslated regions of a VGAM248 host target RNA, herein designated VGAM HOST TARGET RNA. It is further appreciated that while FIG. 1 depicts host target binding sites in the 3UTR region, this is meant as an example only these host target binding sites may be located in the 3UTR region, the 5UTR region, or in both 3UTR and 5UTR regions.

[3433] The complementary binding of VGAM248 RNA, herein designated VGAM RNA, to host target binding sites on VGAM248 host target RNA, herein designated VGAM HOST TARGET RNA, such as BINDING SITE I, BINDING SITE II and BINDING SITE III, inhibits translation of VGAM248 host target RNA, herein designated VGAM HOST TARGET RNA, into VGAM248 host target protein, herein designated VGAM HOST TARGET PROTEIN. VGAM host target protein is therefore outlined by a broken line.

[3434] It is appreciated that VGAM248 host target gene, herein designated VGAM HOST TARGET GENE, in fact represents a plurality of VGAM248 host target genes. The mRNA of each one of this plurality of VGAM248 host target genes comprises one or more host target binding sites, each having a nucleotide sequence which is at least partly complementary to VGAM248 RNA, herein designated VGAM RNA, and which when bound by VGAM248 RNA, herein designated VGAM RNA, causes inhibition of translation of respective one or more VGAM248 host target proteins.

[3435] It is further appreciated by one skilled in the art that the mode of translational inhibition illustrated by FIG. 1 with specific reference to translational inhibition exerted by VGAM248 gene, herein designated VGAM GENE, on one or more VGAM248 host target gene, herein designated VGAM HOST TARGET GENE, is in fact common to other known non-viral miRNA genes. As mentioned hereinabove with reference to the background section, although a specific complementary binding site has been demonstrated only for some of the known miRNA genes (primarily Lin-4 and Let-7), all other recently discovered miRNA genes are also believed by those skilled in the art to modulate expression of other genes by complementary binding, although specific complementary binding sites of these other miRNA genes have not yet been found (Ruvkun G., Perspective: Glimpses of a tiny RNA world, Science 294, 779 (2001)).

[3436] It is yet further appreciated that a function of VGAM248 is inhibition of expression of host target genes, as part of a novel viral mechanism of attacking a host. Accordingly, utilities of VGAM248 include diagnosis, prevention and treatment of viral infection by Vaccinia virus. Specific functions, and accordingly utilities, of VGAM248 correlate with, and may be deduced from, the identity of the host target genes which VGAM248 binds and inhibits, and the function of these host target genes, as elaborated hereinbelow.

[3437] Nucleotide sequences of the VGAM248 precursor RNA, herein designated VGAM PRECURSOR RNA, and of the diced VGAM248 RNA, herein designated VGAM RNA, and a schematic representation of the secondary folding of VGAM248 folded precursor RNA, herein designated VGAM FOLDED PRECURSOR RNA, of VGAM248 are further described hereinbelow with reference to Table 1.

[3438] Nucleotide sequences of host target binding sites, such as BINDING SITE-I, BINDING SITE-II and BINDING SITE-III of FIG. 1, found on, and schematic representation of the complementarity of each of these host target binding sites to VGAM248 RNA, herein designated VGAM RNA, are described hereinbelow with reference to Table 2.

[3439] FIG. 1 further provides a conceptual description of another novel bioinformatically detected viral gene of the present invention, referred to here as Viral Genomic Address Messenger 249 (VGAM249) viral gene, which modulates expression of respective host target genes thereof, the function and utility of which host target genes is known in the art.

[3440] VGAM249 is a novel bioinformatically detected regulatory, non protein coding, viral micro RNA (miRNA) gene. The method by which VGAM249 was detected is described hereinabove with reference to FIGS. 2-8.

[3441] VGAM249 gene, herein designated VGAM GENE, is a viral gene contained in the genome of Vaccinia virus. VGAM249 host target gene, herein designated VGAM HOST TARGET GENE, is a human gene contained in the human genome.

[3442] VGAM249 gene, herein designated VGAM GENE, encodes a VGAM249 precursor RNA, herein designated VGAM PRECURSOR RNA. Similar to other miRNA genes, and unlike most ordinary genes, VGAM249 precursor RNA, herein designated VGAM PRECURSOR RNA, does not encode a protein. A nucleotide sequence identical or highly similar to the nucleotide sequence of VGAM249 precursor RNA is designated SEQ ID:235, and is provided hereinbelow with reference to the sequence listing part. Nucleotide sequence SEQ ID:235 is located at position 139033 relative to the genome of Vaccinia virus.

[3443] VGAM249 precursor RNA, herein designated VGAM PRECURSOR RNA, folds onto itself, forming VGAM249 folded precursor RNA, herein designated VGAM FOLDED PRECURSOR RNA, which has a two-dimensional hairpin structure. As is well known in the art, this hairpin structure, is typical of RNA encoded by miRNA genes, and is due to the fact that the nucleotide sequence of the first half of the RNA encoded by a miRNA gene is an accurate or partial inversed-reversed sequence of the nucleotide sequence of the second half thereof.

[3444] An enzyme complex designated DICER COMPLEX, dices the VGAM249 folded precursor RNA, herein designated VGAM FOLDED PRECURSOR RNA, into VGAM249 RNA, herein designated VGAM RNA, a single stranded ˜22 nt long RNA segment. As is known in the art, dicing of a hairpin structured RNA precursor product into a short ˜22 nt RNA segment is catalyzed by an enzyme complex comprising an enzyme called Dicer together with other necessary proteins. A probable (over 74%) nucleotide sequence of VGAM249 RNA is designated SEQ ID:584, and is provided hereinbelow with reference to the sequence listing part.

[3445] VGAM249 host target gene, herein designated VGAM HOST TARGET GENE, encodes a corresponding messenger RNA, VGAM249 host target RNA, herein designated VGAM HOST TARGET RNA. VGAM249 host target RNA, herein designated VGAM HOST TARGET RNA, comprises three regions, as is typical of mRNA of a protein coding gene: a 5 untranslated region, a protein coding region and a 3 untranslated region, designated 5UTR, PROTEIN CODING and 3UTR respectively.

[3446] VGAM249 RNA, herein designated VGAM RNA, binds complementarily to one or more host target binding sites located in untranslated regions of VGAM249 host target RNA, herein designated VGAM HOST TARGET RNA. This complementary binding is due to the fact that the nucleotide sequence of VGAM249 RNA, herein designated VGAM RNA, is an accurate or a partial inversed-reversed sequence of the nucleotide sequence of each of the host target binding sites. As an illustration, FIG. 1 shows 3 such host target binding sites, designated BINDING SITE I, BINDING SITE II and BINDING SITE III respectively. It is appreciated that the number of host target binding sites shown in FIG. 1 is meant as an illustration only, and is not meant to be limiting VGAM249 RNA, herein designated VGAM RNA, may have a different number of host target binding sites in untranslated regions of a VGAM249 host target RNA, herein designated VGAM HOST TARGET RNA. It is further appreciated that while FIG. 1 depicts host target binding sites in the 3UTR region, this is meant as an example only these host target binding sites may be located in the 3UTR region, the 5UTR region, or in both 3UTR and 5UTR regions.

[3447] The complementary binding of VGAM249 RNA, herein designated VGAM RNA, to host target binding sites on VGAM249 host target RNA, herein designated VGAM HOST TARGET RNA, such as BINDING SITE I, BINDING SITE II and BINDING SITE III, inhibits translation of VGAM249 host target RNA, herein designated VGAM HOST TARGET RNA, into VGAM249 host target protein, herein designated VGAM HOST TARGET PROTEIN. VGAM host target protein is therefore outlined by a broken line.

[3448] It is appreciated that VGAM249 host target gene, herein designated VGAM HOST TARGET GENE, in fact represents a plurality of VGAM249 host target genes. The mRNA of each one of this plurality of VGAM249 host target genes comprises one or more host target binding sites, each having a nucleotide sequence which is at least partly complementary to VGAM249 RNA, herein designated VGAM RNA, and which when bound by VGAM249 RNA, herein designated VGAM RNA, causes inhibition of translation of respective one or more VGAM249 host target proteins.

[3449] It is further appreciated by one skilled in the art that the mode of translational inhibition illustrated by FIG. 1 with specific reference to translational inhibition exerted by VGAM249 gene, herein designated VGAM GENE, on one or more VGAM249 host target gene, herein designated VGAM HOST TARGET GENE, is in fact common to other known non-viral miRNA genes. As mentioned hereinabove with reference to the background section, although a specific complementary binding site has been demonstrated only for some of the known miRNA genes (primarily Lin-4 and Let-7), all other recently discovered miRNA genes are also believed by those skilled in the art to modulate expression of other genes by complementary binding, although specific complementary binding sites of these other miRNA genes have not yet been found (Ruvkun G., Perspective: Glimpses of a tiny RNA world, Science 294, 779 (2001)).

[3450] It is yet further appreciated that a function of VGAM249 is inhibition of expression of host target genes, as part of a novel viral mechanism of attacking a host. Accordingly, utilities of VGAM249 include diagnosis, prevention and treatment of viral infection by Vaccinia virus. Specific functions, and accordingly utilities, of VGAM249 correlate with, and may be deduced from, the identity of the host target genes which VGAM249 binds and inhibits, and the function of these host target genes, as elaborated hereinbelow.

[3451] Nucleotide sequences of the VGAM249 precursor RNA, herein designated VGAM PRECURSOR RNA, and of the diced VGAM249 RNA, herein designated VGAM RNA, and a schematic representation of the secondary folding of VGAM249 folded precursor RNA, herein designated VGAM FOLDED PRECURSOR RNA, of VGAM249 are further described hereinbelow with reference to Table 1.

[3452] Nucleotide sequences of host target binding sites, such as BINDING SITE-I, BINDING SITE-II and BINDING SITE-III of FIG. 1, found on, and schematic representation of the complementarity of each of these host target binding sites to VGAM249 RNA, herein designated VGAM RNA, are described hereinbelow with reference to Table 2.

[3453] FIG. 1 further provides a conceptual description of another novel bioinformatically detected viral gene of the present invention, referred to here as Viral Genomic Address Messenger 250 (VGAM250) viral gene, which modulates expression of respective host target genes thereof, the function and utility of which host target genes is known in the art.

[3454] VGAM250 is a novel bioinformatically detected regulatory, non protein coding, viral micro RNA (miRNA) gene. The method by which VGAM250 was detected is described hereinabove with reference to FIGS. 2-8.

[3455] VGAM250 gene, herein designated VGAM GENE, is a viral gene contained in the genome of Vaccinia virus. VGAM250 host target gene, herein designated VGAM HOST TARGET GENE, is a human gene contained in the human genome.

[3456] VGAM250 gene, herein designated VGAM GENE, encodes a VGAM250 precursor RNA, herein designated VGAM PRECURSOR RNA. Similar to other miRNA genes, and unlike most ordinary genes, VGAM250 precursor RNA, herein designated VGAM PRECURSOR RNA, does not encode a protein. A nucleotide sequence identical or highly similar to the nucleotide sequence of VGAM250 precursor RNA is designated SEQ ID:236, and is provided hereinbelow with reference to the sequence listing part. Nucleotide sequence SEQ ID:236 is located at position 139228 relative to the genome of Vaccinia virus.

[3457] VGAM250 precursor RNA, herein designated VGAM PRECURSOR RNA, folds onto itself, forming VGAM250 folded precursor RNA, herein designated VGAM FOLDED PRECURSOR RNA, which has a two-dimensional hairpin structure. As is well known in the art, this hairpin structure, is typical of RNA encoded by miRNA genes, and is due to the fact that the nucleotide sequence of the first half of the RNA encoded by a miRNA gene is an accurate or partial inversed-reversed sequence of the nucleotide sequence of the second half thereof.

[3458] An enzyme complex designated DICER COMPLEX, dices the VGAM250 folded precursor RNA, herein designated VGAM FOLDED PRECURSOR RNA, into VGAM250 RNA, herein designated VGAM RNA, a single stranded ˜22 nt long RNA segment. As is known in the art, dicing of a hairpin structured RNA precursor product into a short ˜22 nt RNA segment is catalyzed by an enzyme complex comprising an enzyme called Dicer together with other necessary proteins. A probable (over 71%) nucleotide sequence of VGAM250 RNA is designated SEQ ID:585, and is provided hereinbelow with reference to the sequence listing part.

[3459] VGAM250 host target gene, herein designated VGAM HOST TARGET GENE, encodes a corresponding messenger RNA, VGAM250 host target RNA, herein designated VGAM HOST TARGET RNA. VGAM250 host target RNA, herein designated VGAM HOST TARGET RNA, comprises three regions, as is typical of mRNA of a protein coding gene: a 5 untranslated region, a protein coding region and a 3 untranslated region, designated 5UTR, PROTEIN CODING and 3UTR respectively.

[3460] VGAM250 RNA, herein designated VGAM RNA, binds complementarily to one or more host target binding sites located in untranslated regions of VGAM250 host target RNA, herein designated VGAM HOST TARGET RNA. This complementary binding is due to the fact that the nucleotide sequence of VGAM250 RNA, herein designated VGAM RNA, is an accurate or a partial inversed-reversed sequence of the nucleotide sequence of each of the host target binding sites. As an illustration, FIG. 1 shows 3 such host target binding sites, designated BINDING SITE I, BINDING SITE II and BINDING SITE III respectively. It is appreciated that the number of host target binding sites shown in FIG. 1 is meant as an illustration only, and is not meant to be limiting VGAM250 RNA, herein designated VGAM RNA, may have a different number of host target binding sites in untranslated regions of a VGAM250 host target RNA, herein designated VGAM HOST TARGET RNA. It is further appreciated that while FIG. 1 depicts host target binding sites in the 3UTR region, this is meant as an example only these host target binding sites may be located in the 3UTR region, the 5UTR region, or in both 3UTR and 5UTR regions.

[3461] The complementary binding of VGAM250 RNA, herein designated VGAM RNA, to host target binding sites on VGAM250 host target RNA, herein designated VGAM HOST TARGET RNA, such as BINDING SITE I, BINDING SITE II and BINDING SITE III, inhibits translation of VGAM250 host target RNA, herein designated VGAM HOST TARGET RNA, into VGAM250 host target protein, herein designated VGAM HOST TARGET PROTEIN. VGAM host target protein is therefore outlined by a broken line.

[3462] It is appreciated that VGAM250 host target gene, herein designated VGAM HOST TARGET GENE, in fact represents a plurality of VGAM250 host target genes. The mRNA of each one of this plurality of VGAM250 host target genes comprises one or more host target binding sites, each having a nucleotide sequence which is at least partly complementary to VGAM250 RNA, herein designated VGAM RNA, and which when bound by VGAM250 RNA, herein designated VGAM RNA, causes inhibition of translation of respective one or more VGAM250 host target proteins.

[3463] It is further appreciated by one skilled in the art that the mode of translational inhibition illustrated by FIG. 1 with specific reference to translational inhibition exerted by VGAM250 gene, herein designated VGAM GENE, on one or more VGAM250 host target gene, herein designated VGAM HOST TARGET GENE, is in fact common to other known non-viral miRNA genes. As mentioned hereinabove with reference to the background section, although a specific complementary binding site has been demonstrated only for some of the known miRNA genes (primarily Lin-4 and Let-7), all other recently discovered miRNA genes are also believed by those skilled in the art to modulate expression of other genes by complementary binding, although specific complementary binding sites of these other miRNA genes have not yet been found (Ruvkun G., Perspective: Glimpses of a tiny RNA world, Science 294, 779 (2001)).

[3464] It is yet further appreciated that a function of VGAM250 is inhibition of expression of host target genes, as part of a novel viral mechanism of attacking a host. Accordingly, utilities of VGAM250 include diagnosis, prevention and treatment of viral infection by Vaccinia virus. Specific functions, and accordingly utilities, of VGAM250 correlate with, and may be deduced from, the identity of the host target genes which VGAM250 binds and inhibits, and the function of these host target genes, as elaborated hereinbelow.

[3465] Nucleotide sequences of the VGAM250 precursor RNA, herein designated VGAM PRECURSOR RNA, and of the diced VGAM250 RNA, herein designated VGAM RNA, and a schematic representation of the secondary folding of VGAM250 folded precursor RNA, herein designated VGAM FOLDED PRECURSOR RNA, of VGAM250 are further described hereinbelow with reference to Table 1.

[3466] Nucleotide sequences of host target binding sites, such as BINDING SITE-I, BINDING SITE-II and BINDING SITE-III of FIG. 1, found on, and schematic representation of the complementarity of each of these host target binding sites to VGAM250 RNA, herein designated VGAM RNA, are described hereinbelow with reference to Table 2.

[3467] FIG. 1 further provides a conceptual description of another novel bioinformatically detected viral gene of the present invention, referred to here as Viral Genomic Address Messenger 251 (VGAM251) viral gene, which modulates expression of respective host target genes thereof, the function and utility of which host target genes is known in the art.

[3468] VGAM251 is a novel bioinformatically detected regulatory, non protein coding, viral micro RNA (miRNA) gene. The method by which VGAM251 was detected is described hereinabove with reference to FIGS. 2-8.

[3469] VGAM251 gene, herein designated VGAM GENE, is a viral gene contained in the genome of Vaccinia virus. VGAM251 host target gene, herein designated VGAM HOST TARGET GENE, is a human gene contained in the human genome.

[3470] VGAM251 gene, herein designated VGAM GENE, encodes a VGAM251 precursor RNA, herein designated VGAM PRECURSOR RNA. Similar to other miRNA genes, and unlike most ordinary genes, VGAM251 precursor RNA, herein designated VGAM PRECURSOR RNA, does not encode a protein. A nucleotide sequence identical or highly similar to the nucleotide sequence of VGAM251 precursor RNA is designated SEQ ID:237, and is provided hereinbelow with reference to the sequence listing part. Nucleotide sequence SEQ ID:237 is located at position 137709 relative to the genome of Vaccinia virus.

[3471] VGAM251 precursor RNA, herein designated VGAM PRECURSOR RNA, folds onto itself, forming VGAM251 folded precursor RNA, herein designated VGAM FOLDED PRECURSOR RNA, which has a two-dimensional hairpin structure. As is well known in the art, this hairpin structure, is typical of RNA encoded by miRNA genes, and is due to the fact that the nucleotide sequence of the first half of the RNA encoded by a miRNA gene is an accurate or partial inversed-reversed sequence of the nucleotide sequence of the second half thereof.

[3472] An enzyme complex designated DICER COMPLEX, dices the VGAM251 folded precursor RNA, herein designated VGAM FOLDED PRECURSOR RNA, into VGAM251 RNA, herein designated VGAM RNA, a single stranded ˜22 nt long RNA segment. As is known in the art, dicing of a hairpin structured RNA precursor product into a short ˜22 nt RNA segment is catalyzed by an enzyme complex comprising an enzyme called Dicer together with other necessary proteins. A probable (over 83%) nucleotide sequence of VGAM251 RNA is designated SEQ ID:586, and is provided hereinbelow with reference to the sequence listing part.

[3473] VGAM251 host target gene, herein designated VGAM HOST TARGET GENE, encodes a corresponding messenger RNA, VGAM251 host target RNA, herein designated VGAM HOST TARGET RNA. VGAM251 host target RNA, herein designated VGAM HOST TARGET RNA, comprises three regions, as is typical of mRNA of a protein coding gene: a 5 untranslated region, a protein coding region and a 3 untranslated region, designated 5UTR, PROTEIN CODING and 3UTR respectively.

[3474] VGAM251 RNA, herein designated VGAM RNA, binds complementarily to one or more host target binding sites located in untranslated regions of VGAM251 host target RNA, herein designated VGAM HOST TARGET RNA. This complementary binding is due to the fact that the nucleotide sequence of VGAM251 RNA, herein designated VGAM RNA, is an accurate or a partial inversed-reversed sequence of the nucleotide sequence of each of the host target binding sites. As an illustration, FIG. 1 shows 3 such host target binding sites, designated BINDING SITE I, BINDING SITE II and BINDING SITE III respectively. It is appreciated that the number of host target binding sites shown in FIG. 1 is meant as an illustration only, and is not meant to be limiting VGAM251 RNA, herein designated VGAM RNA, may have a different number of host target binding sites in untranslated regions of a VGAM251 host target RNA, herein designated VGAM HOST TARGET RNA. It is further appreciated that while FIG. 1 depicts host target binding sites in the 3UTR region, this is meant as an example only these host target binding sites may be located in the 3UTR region, the 5UTR region, or in both 3UTR and 5UTR regions.

[3475] The complementary binding of VGAM251 RNA, herein designated VGAM RNA, to host target binding sites on VGAM251 host target RNA, herein designated VGAM HOST TARGET RNA, such as BINDING SITE I, BINDING SITE II and BINDING SITE III, inhibits translation of VGAM251 host target RNA, herein designated VGAM HOST TARGET RNA, into VGAM251 host target protein, herein designated VGAM HOST TARGET PROTEIN. VGAM host target protein is therefore outlined by a broken line.

[3476] It is appreciated that VGAM251 host target gene, herein designated VGAM HOST TARGET GENE, in fact represents a plurality of VGAM251 host target genes. The mRNA of each one of this plurality of VGAM251 host target genes comprises one or more host target binding sites, each having a nucleotide sequence which is at least partly complementary to VGAM251 RNA, herein designated VGAM RNA, and which when bound by VGAM251 RNA, herein designated VGAM RNA, causes inhibition of translation of respective one or more VGAM251 host target proteins.

[3477] It is further appreciated by one skilled in the art that the mode of translational inhibition illustrated by FIG. 1 with specific reference to translational inhibition exerted by VGAM251 gene, herein designated VGAM GENE, on one or more VGAM251 host target gene, herein designated VGAM HOST TARGET GENE, is in fact common to other known non-viral miRNA genes. As mentioned hereinabove with reference to the background section, although a specific complementary binding site has been demonstrated only for some of the known miRNA genes (primarily Lin-4 and Let-7), all other recently discovered miRNA genes are also believed by those skilled in the art to modulate expression of other genes by complementary binding, although specific complementary binding sites of these other miRNA genes have not yet been found (Ruvkun G., Perspective: Glimpses of a tiny RNA world, Science 294, 779 (2001)).

[3478] It is yet further appreciated that a function of VGAM251 is inhibition of expression of host target genes, as part of a novel viral mechanism of attacking a host. Accordingly, utilities of VGAM251 include diagnosis, prevention and treatment of viral infection by Vaccinia virus. Specific functions, and accordingly utilities, of VGAM251 correlate with, and may be deduced from, the identity of the host target genes which VGAM251 binds and inhibits, and the function of these host target genes, as elaborated hereinbelow.

[3479] Nucleotide sequences of the VGAM251 precursor RNA, herein designated VGAM PRECURSOR RNA, and of the diced VGAM251 RNA, herein designated VGAM RNA, and a schematic representation of the secondary folding of VGAM251 folded precursor RNA, herein designated VGAM FOLDED PRECURSOR RNA, of VGAM251 are further described hereinbelow with reference to Table 1.

[3480] Nucleotide sequences of host target binding sites, such as BINDING SITE-I, BINDING SITE-II and BINDING SITE-III of FIG. 1, found on, and schematic representation of the complementarity of each of these host target binding sites to VGAM251 RNA, herein designated VGAM RNA, are described hereinbelow with reference to Table 2.

[3481] FIG. 1 further provides a conceptual description of another novel bioinformatically detected viral gene of the present invention, referred to here as Viral Genomic Address Messenger 252 (VGAM252) viral gene, which modulates expression of respective host target genes thereof, the function and utility of which host target genes is known in the art.

[3482] VGAM252 is a novel bioinformatically detected regulatory, non protein coding, viral micro RNA (miRNA) gene. The method by which VGAM252 was detected is described hereinabove with reference to FIGS. 2-8.

[3483] VGAM252 gene, herein designated VGAM GENE, is a viral gene contained in the genome of Vaccinia virus. VGAM252 host target gene, herein designated VGAM HOST TARGET GENE, is a human gene contained in the human genome.

[3484] VGAM252 gene, herein designated VGAM GENE, encodes a VGAM252 precursor RNA, herein designated VGAM PRECURSOR RNA. Similar to other miRNA genes, and unlike most ordinary genes, VGAM252 precursor RNA, herein designated VGAM PRECURSOR RNA, does not encode a protein. A nucleotide sequence identical or highly similar to the nucleotide sequence of VGAM252 precursor RNA is designated SEQ ID:238, and is provided hereinbelow with reference to the sequence listing part. Nucleotide sequence SEQ ID:238 is located at position 140854 relative to the genome of Vaccinia virus.

[3485] VGAM252 precursor RNA, herein designated VGAM PRECURSOR RNA, folds onto itself, forming VGAM252 folded precursor RNA, herein designated VGAM FOLDED PRECURSOR RNA, which has a two-dimensional hairpin structure. As is well known in the art, this hairpin structure, is typical of RNA encoded by miRNA genes, and is due to the fact that the nucleotide sequence of the first half of the RNA encoded by a miRNA gene is an accurate or partial inversed-reversed sequence of the nucleotide sequence of the second half thereof.

[3486] An enzyme complex designated DICER COMPLEX, dices the VGAM252 folded precursor RNA, herein designated VGAM FOLDED PRECURSOR RNA, into VGAM252 RNA, herein designated VGAM RNA, a single stranded ˜22 nt long RNA segment. As is known in the art, dicing of a hairpin structured RNA precursor product into a short ˜22 nt RNA segment is catalyzed by an enzyme complex comprising an enzyme called Dicer together with other necessary proteins. A probable (over 80%) nucleotide sequence of VGAM252 RNA is designated SEQ ID:587, and is provided hereinbelow with reference to the sequence listing part.

[3487] VGAM252 host target gene, herein designated VGAM HOST TARGET GENE, encodes a corresponding messenger RNA, VGAM252 host target RNA, herein designated VGAM HOST TARGET RNA. VGAM252 host target RNA, herein designated VGAM HOST TARGET RNA, comprises three regions, as is typical of mRNA of a protein coding gene: a 5 untranslated region, a protein coding region and a 3 untranslated region, designated 5UTR, PROTEIN CODING and 3UTR respectively.

[3488] VGAM252 RNA, herein designated VGAM RNA, binds complementarily to one or more host target binding sites located in untranslated regions of VGAM252 host target RNA, herein designated VGAM HOST TARGET RNA. This complementary binding is due to the fact that the nucleotide sequence of VGAM252 RNA, herein designated VGAM RNA, is an accurate or a partial inversed-reversed sequence of the nucleotide sequence of each of the host target binding sites. As an illustration, FIG. 1 shows 3 such host target binding sites, designated BINDING SITE I, BINDING SITE II and BINDING SITE III respectively. It is appreciated that the number of host target binding sites shown in FIG. 1 is meant as an illustration only, and is not meant to be limiting VGAM252 RNA, herein designated VGAM RNA, may have a different number of host target binding sites in untranslated regions of a VGAM252 host target RNA, herein designated VGAM HOST TARGET RNA. It is further appreciated that while FIG. 1 depicts host target binding sites in the 3UTR region, this is meant as an example only these host target binding sites may be located in the 3UTR region, the 5UTR region, or in both 3UTR and 5UTR regions.

[3489] The complementary binding of VGAM252 RNA, herein designated VGAM RNA, to host target binding sites on VGAM252 host target RNA, herein designated VGAM HOST TARGET RNA, such as BINDING SITE I, BINDING SITE II and BINDING SITE III, inhibits translation of VGAM252 host target RNA, herein designated VGAM HOST TARGET RNA, into VGAM252 host target protein, herein designated VGAM HOST TARGET PROTEIN. VGAM host target protein is therefore outlined by a broken line.

[3490] It is appreciated that VGAM252 host target gene, herein designated VGAM HOST TARGET GENE, in fact represents a plurality of VGAM252 host target genes. The mRNA of each one of this plurality of VGAM252 host target genes comprises one or more host target binding sites, each having a nucleotide sequence which is at least partly complementary to VGAM252 RNA, herein designated VGAM RNA, and which when bound by VGAM252 RNA, herein designated VGAM RNA, causes inhibition of translation of respective one or more VGAM252 host target proteins.

[3491] It is further appreciated by one skilled in the art that the mode of translational inhibition illustrated by FIG. 1 with specific reference to translational inhibition exerted by VGAM252 gene, herein designated VGAM GENE, on one or more VGAM252 host target gene, herein designated VGAM HOST TARGET GENE, is in fact common to other known non-viral miRNA genes. As mentioned hereinabove with reference to the background section, although a specific complementary binding site has been demonstrated only for some of the known miRNA genes (primarily Lin-4 and Let-7), all other recently discovered miRNA genes are also believed by those skilled in the art to modulate expression of other genes by complementary binding, although specific complementary binding sites of these other miRNA genes have not yet been found (Ruvkun G., Perspective: Glimpses of a tiny RNA world, Science 294, 779 (2001)).

[3492] It is yet further appreciated that a function of VGAM252 is inhibition of expression of host target genes, as part of a novel viral mechanism of attacking a host. Accordingly, utilities of VGAM252 include diagnosis, prevention and treatment of viral infection by Vaccinia virus. Specific functions, and accordingly utilities, of VGAM252 correlate with, and may be deduced from, the identity of the host target genes which VGAM252 binds and inhibits, and the function of these host target genes, as elaborated hereinbelow.

[3493] Nucleotide sequences of the VGAM252 precursor RNA, herein designated VGAM PRECURSOR RNA, and of the diced VGAM252 RNA, herein designated VGAM RNA, and a schematic representation of the secondary folding of VGAM252 folded precursor RNA, herein designated VGAM FOLDED PRECURSOR RNA, of VGAM252 are further described hereinbelow with reference to Table 1.

[3494] Nucleotide sequences of host target binding sites, such as BINDING SITE-I, BINDING SITE-II and BINDING SITE-III of FIG. 1, found on, and schematic representation of the complementarity of each of these host target binding sites to VGAM252 RNA, herein designated VGAM RNA, are described hereinbelow with reference to Table 2.

[3495] FIG. 1 further provides a conceptual description of another novel bioinformatically detected viral gene of the present invention, referred to here as Viral Genomic Address Messenger 253 (VGAM253) viral gene, which modulates expression of respective host target genes thereof, the function and utility of which host target genes is known in the art.

[3496] VGAM253 is a novel bioinformatically detected regulatory, non protein coding, viral micro RNA (miRNA) gene. The method by which VGAM253 was detected is described hereinabove with reference to FIGS. 2-8.

[3497] VGAM253 gene, herein designated VGAM GENE, is a viral gene contained in the genome of Vaccinia virus. VGAM253 host target gene, herein designated VGAM HOST TARGET GENE, is a human gene contained in the human genome.

[3498] VGAM253 gene, herein designated VGAM GENE, encodes a VGAM253 precursor RNA, herein designated VGAM PRECURSOR RNA. Similar to other miRNA genes, and unlike most ordinary genes, VGAM253 precursor RNA, herein designated VGAM PRECURSOR RNA, does not encode a protein. A nucleotide sequence identical or highly similar to the nucleotide sequence of VGAM253 precursor RNA is designated SEQ ID:239, and is provided hereinbelow with reference to the sequence listing part. Nucleotide sequence SEQ ID:239 is located at position 140990 relative to the genome of Vaccinia virus.

[3499] VGAM253 precursor RNA, herein designated VGAM PRECURSOR RNA, folds onto itself, forming VGAM253 folded precursor RNA, herein designated VGAM FOLDED PRECURSOR RNA, which has a two-dimensional hairpin structure. As is well known in the art, this hairpin structure, is typical of RNA encoded by miRNA genes, and is due to the fact that the nucleotide sequence of the first half of the RNA encoded by a miRNA gene is an accurate or partial inversed-reversed sequence of the nucleotide sequence of the second half thereof.

[3500] An enzyme complex designated DICER COMPLEX, dices the VGAM253 folded precursor RNA, herein designated VGAM FOLDED PRECURSOR RNA, into VGAM253 RNA, herein designated VGAM RNA, a single stranded ˜22 nt long RNA segment. As is known in the art, dicing of a hairpin structured RNA precursor product into a short ˜22 nt RNA segment is catalyzed by an enzyme complex comprising an enzyme called Dicer together with other necessary proteins. A probable (over 71%) nucleotide sequence of VGAM253 RNA is designated SEQ ID:588, and is provided hereinbelow with reference to the sequence listing part.

[3501] VGAM253 host target gene, herein designated VGAM HOST TARGET GENE, encodes a corresponding messenger RNA, VGAM253 host target RNA, herein designated VGAM HOST TARGET RNA. VGAM253 host target RNA, herein designated VGAM HOST TARGET RNA, comprises three regions, as is typical of mRNA of a protein coding gene: a 5 untranslated region, a protein coding region and a 3 untranslated region, designated 5UTR, PROTEIN CODING and 3UTR respectively.

[3502] VGAM253 RNA, herein designated VGAM RNA, binds complementarily to one or more host target binding sites located in untranslated regions of VGAM253 host target RNA, herein designated VGAM HOST TARGET RNA. This complementary binding is due to the fact that the nucleotide sequence of VGAM253 RNA, herein designated VGAM RNA, is an accurate or a partial inversed-reversed sequence of the nucleotide sequence of each of the host target binding sites. As an illustration, FIG. 1 shows 3 such host target binding sites, designated BINDING SITE I, BINDING SITE II and BINDING SITE III respectively. It is appreciated that the number of host target binding sites shown in FIG. 1 is meant as an illustration only, and is not meant to be limiting VGAM253 RNA, herein designated VGAM RNA, may have a different number of host target binding sites in untranslated regions of a VGAM253 host target RNA, herein designated VGAM HOST TARGET RNA. It is further appreciated that while FIG. 1 depicts host target binding sites in the 3UTR region, this is meant as an example only these host target binding sites may be located in the 3UTR region, the 5UTR region, or in both 3UTR and 5UTR regions.

[3503] The complementary binding of VGAM253 RNA, herein designated VGAM RNA, to host target binding sites on VGAM253 host target RNA, herein designated VGAM HOST TARGET RNA, such as BINDING SITE I, BINDING SITE II and BINDING SITE III, inhibits translation of VGAM253 host target RNA, herein designated VGAM HOST TARGET RNA, into VGAM253 host target protein, herein designated VGAM HOST TARGET PROTEIN. VGAM host target protein is therefore outlined by a broken line.

[3504] It is appreciated that VGAM253 host target gene, herein designated VGAM HOST TARGET GENE, in fact represents a plurality of VGAM253 host target genes. The mRNA of each one of this plurality of VGAM253 host target genes comprises one or more host target binding sites, each having a nucleotide sequence which is at least partly complementary to VGAM253 RNA, herein designated VGAM RNA, and which when bound by VGAM253 RNA, herein designated VGAM RNA, causes inhibition of translation of respective one or more VGAM253 host target proteins.

[3505] It is further appreciated by one skilled in the art that the mode of translational inhibition illustrated by FIG. 1 with specific reference to translational inhibition exerted by VGAM253 gene, herein designated VGAM GENE, on one or more VGAM253 host target gene, herein designated VGAM HOST TARGET GENE, is in fact common to other known non-viral miRNA genes. As mentioned hereinabove with reference to the background section, although a specific complementary binding site has been demonstrated only for some of the known miRNA genes (primarily Lin-4 and Let-7), all other recently discovered miRNA genes are also believed by those skilled in the art to modulate expression of other genes by complementary binding, although specific complementary binding sites of these other miRNA genes have not yet been found (Ruvkun G., Perspective: Glimpses of a tiny RNA world, Science 294, 779 (2001)).

[3506] It is yet further appreciated that a function of VGAM253 is inhibition of expression of host target genes, as part of a novel viral mechanism of attacking a host. Accordingly, utilities of VGAM253 include diagnosis, prevention and treatment of viral infection by Vaccinia virus. Specific functions, and accordingly utilities, of VGAM253 correlate with, and may be deduced from, the identity of the host target genes which VGAM253 binds and inhibits, and the function of these host target genes, as elaborated hereinbelow.

[3507] Nucleotide sequences of the VGAM253 precursor RNA, herein designated VGAM PRECURSOR RNA, and of the diced VGAM253 RNA, herein designated VGAM RNA, and a schematic representation of the secondary folding of VGAM253 folded precursor RNA, herein designated VGAM FOLDED PRECURSOR RNA, of VGAM253 are further described hereinbelow with reference to Table 1.

[3508] Nucleotide sequences of host target binding sites, such as BINDING SITE-I, BINDING SITE-II and BINDING SITE-III of FIG. 1, found on, and schematic representation of the complementarity of each of these host target binding sites to VGAM253 RNA, herein designated VGAM RNA, are described hereinbelow with reference to Table 2.

[3509] FIG. 1 further provides a conceptual description of another novel bioinformatically detected viral gene of the present invention, referred to here as Viral Genomic Address Messenger 254 (VGAM254) viral gene, which modulates expression of respective host target genes thereof, the function and utility of which host target genes is known in the art.

[3510] VGAM254 is a novel bioinformatically detected regulatory, non protein coding, viral micro RNA (miRNA) gene. The method by which VGAM254 was detected is described hereinabove with reference to FIGS. 2-8.

[3511] VGAM254 gene, herein designated VGAM GENE, is a viral gene contained in the genome of Vaccinia virus. VGAM254 host target gene, herein designated VGAM HOST TARGET GENE, is a human gene contained in the human genome.

[3512] VGAM254 gene, herein designated VGAM GENE, encodes a VGAM254 precursor RNA, herein designated VGAM PRECURSOR RNA. Similar to other miRNA genes, and unlike most ordinary genes, VGAM254 precursor RNA, herein designated VGAM PRECURSOR RNA, does not encode a protein. A nucleotide sequence identical or highly similar to the nucleotide sequence of VGAM254 precursor RNA is designated SEQ ID:240, and is provided hereinbelow with reference to the sequence listing part. Nucleotide sequence SEQ ID:240 is located at position 141210 relative to the genome of Vaccinia virus.

[3513] VGAM254 precursor RNA, herein designated VGAM PRECURSOR RNA, folds onto itself, forming VGAM254 folded precursor RNA, herein designated VGAM FOLDED PRECURSOR RNA, which has a two-dimensional hairpin structure. As is well known in the art, this hairpin structure, is typical of RNA encoded by miRNA genes, and is due to the fact that the nucleotide sequence of the first half of the RNA encoded by a miRNA gene is an accurate or partial inversed-reversed sequence of the nucleotide sequence of the second half thereof.

[3514] An enzyme complex designated DICER COMPLEX, dices the VGAM254 folded precursor RNA, herein designated VGAM FOLDED PRECURSOR RNA, into VGAM254 RNA, herein designated VGAM RNA, a single stranded ˜22 nt long RNA segment. As is known in the art, dicing of a hairpin structured RNA precursor product into a short ˜22 nt RNA segment is catalyzed by an enzyme complex comprising an enzyme called Dicer together with other necessary proteins. A probable (over 70%) nucleotide sequence of VGAM254 RNA is designated SEQ ID:589, and is provided hereinbelow with reference to the sequence listing part.

[3515] VGAM254 host target gene, herein designated VGAM HOST TARGET GENE, encodes a corresponding messenger RNA, VGAM254 host target RNA, herein designated VGAM HOST TARGET RNA. VGAM254 host target RNA, herein designated VGAM HOST TARGET RNA, comprises three regions, as is typical of mRNA of a protein coding gene: a 5 untranslated region, a protein coding region and a 3 untranslated region, designated 5UTR, PROTEIN CODING and 3UTR respectively.

[3516] VGAM254 RNA, herein designated VGAM RNA, binds complementarily to one or more host target binding sites located in untranslated regions of VGAM254 host target RNA, herein designated VGAM HOST TARGET RNA. This complementary binding is due to the fact that the nucleotide sequence of VGAM254 RNA, herein designated VGAM RNA, is an accurate or a partial inversed-reversed sequence of the nucleotide sequence of each of the host target binding sites. As an illustration, FIG. 1 shows 3 such host target binding sites, designated BINDING SITE I, BINDING SITE II and BINDING SITE III respectively. It is appreciated that the number of host target binding sites shown in FIG. 1 is meant as an illustration only, and is not meant to be limiting VGAM254 RNA, herein designated VGAM RNA, may have a different number of host target binding sites in untranslated regions of a VGAM254 host target RNA, herein designated VGAM HOST TARGET RNA. It is further appreciated that while FIG. 1 depicts host target binding sites in the 3UTR region, this is meant as an example only these host target binding sites may be located in the 3UTR region, the 5UTR region, or in both 3UTR and 5UTR regions.

[3517] The complementary binding of VGAM254 RNA, herein designated VGAM RNA, to host target binding sites on VGAM254 host target RNA, herein designated VGAM HOST TARGET RNA, such as BINDING SITE I, BINDING SITE II and BINDING SITE III, inhibits translation of VGAM254 host target RNA, herein designated VGAM HOST TARGET RNA, into VGAM254 host target protein, herein designated VGAM HOST TARGET PROTEIN. VGAM host target protein is therefore outlined by a broken line.

[3518] It is appreciated that VGAM254 host target gene, herein designated VGAM HOST TARGET GENE, in fact represents a plurality of VGAM254 host target genes. The mRNA of each one of this plurality of VGAM254 host target genes comprises one or more host target binding sites, each having a nucleotide sequence which is at least partly complementary to VGAM254 RNA, herein designated VGAM RNA, and which when bound by VGAM254 RNA, herein designated VGAM RNA, causes inhibition of translation of respective one or more VGAM254 host target proteins.

[3519] It is further appreciated by one skilled in the art that the mode of translational inhibition illustrated by FIG. 1 with specific reference to translational inhibition exerted by VGAM254 gene, herein designated VGAM GENE, on one or more VGAM254 host target gene, herein designated VGAM HOST TARGET GENE, is in fact common to other known non-viral miRNA genes. As mentioned hereinabove with reference to the background section, although a specific complementary binding site has been demonstrated only for some of the known miRNA genes (primarily Lin-4 and Let-7), all other recently discovered miRNA genes are also believed by those skilled in the art to modulate expression of other genes by complementary binding, although specific complementary binding sites of these other miRNA genes have not yet been found (Ruvkun G., Perspective: Glimpses of a tiny RNA world, Science 294, 779 (2001)).

[3520] It is yet further appreciated that a function of VGAM254 is inhibition of expression of host target genes, as part of a novel viral mechanism of attacking a host. Accordingly, utilities of VGAM254 include diagnosis, prevention and treatment of viral infection by Vaccinia virus. Specific functions, and accordingly utilities, of VGAM254 correlate with, and may be deduced from, the identity of the host target genes which VGAM254 binds and inhibits, and the function of these host target genes, as elaborated hereinbelow.

[3521] Nucleotide sequences of the VGAM254 precursor RNA, herein designated VGAM PRECURSOR RNA, and of the diced VGAM254 RNA, herein designated VGAM RNA, and a schematic representation of the secondary folding of VGAM254 folded precursor RNA, herein designated VGAM FOLDED PRECURSOR RNA, of VGAM254 are further described hereinbelow with reference to Table 1.

[3522] Nucleotide sequences of host target binding sites, such as BINDING SITE-I, BINDING SITE-II and BINDING SITE-III of FIG. 1, found on, and schematic representation of the complementarity of each of these host target binding sites to VGAM254 RNA, herein designated VGAM RNA, are described hereinbelow with reference to Table 2.

[3523] FIG. 1 further provides a conceptual description of another novel bioinformatically detected viral gene of the present invention, referred to here as Viral Genomic Address Messenger 255 (VGAM255) viral gene, which modulates expression of respective host target genes thereof, the function and utility of which host target genes is known in the art.

[3524] VGAM255 is a novel bioinformatically detected regulatory, non protein coding, viral micro RNA (miRNA) gene. The method by which VGAM255 was detected is described hereinabove with reference to FIGS. 2-8.

[3525] VGAM255 gene, herein designated VGAM GENE, is a viral gene contained in the genome of Vaccinia virus. VGAM255 host target gene, herein designated VGAM HOST TARGET GENE, is a human gene contained in the human genome.

[3526] VGAM255 gene, herein designated VGAM GENE, encodes a VGAM255 precursor RNA, herein designated VGAM PRECURSOR RNA. Similar to other miRNA genes, and unlike most ordinary genes, VGAM255 precursor RNA, herein designated VGAM PRECURSOR RNA, does not encode a protein. A nucleotide sequence identical or highly similar to the nucleotide sequence of VGAM255 precursor RNA is designated SEQ ID:241, and is provided hereinbelow with reference to the sequence listing part. Nucleotide sequence SEQ ID:241 is located at position 141044 relative to the genome of Vaccinia virus.

[3527] VGAM255 precursor RNA, herein designated VGAM PRECURSOR RNA, folds onto itself, forming VGAM255 folded precursor RNA, herein designated VGAM FOLDED PRECURSOR RNA, which has a two-dimensional hairpin structure. As is well known in the art, this hairpin structure, is typical of RNA encoded by miRNA genes, and is due to the fact that the nucleotide sequence of the first half of the RNA encoded by a miRNA gene is an accurate or partial inversed-reversed sequence of the nucleotide sequence of the second half thereof.

[3528] An enzyme complex designated DICER COMPLEX, dices the VGAM255 folded precursor RNA, herein designated VGAM FOLDED PRECURSOR RNA, into VGAM255 RNA, herein designated VGAM RNA, a single stranded ˜22 nt long RNA segment. As is known in the art, dicing of a hairpin structured RNA precursor product into a short ˜22 nt RNA segment is catalyzed by an enzyme complex comprising an enzyme called Dicer together with other necessary proteins. A probable (over 92%) nucleotide sequence of VGAM255 RNA is designated SEQ ID:590, and is provided hereinbelow with reference to the sequence listing part.

[3529] VGAM255 host target gene, herein designated VGAM HOST TARGET GENE, encodes a corresponding messenger RNA, VGAM255 host target RNA, herein designated VGAM HOST TARGET RNA. VGAM255 host target RNA, herein designated VGAM HOST TARGET RNA, comprises three regions, as is typical of mRNA of a protein coding gene: a 5 untranslated region, a protein coding region and a 3 untranslated region, designated 5UTR, PROTEIN CODING and 3UTR respectively.

[3530] VGAM255 RNA, herein designated VGAM RNA, binds complementarily to one or more host target binding sites located in untranslated regions of VGAM255 host target RNA, herein designated VGAM HOST TARGET RNA. This complementary binding is due to the fact that the nucleotide sequence of VGAM255 RNA, herein designated VGAM RNA, is an accurate or a partial inversed-reversed sequence of the nucleotide sequence of each of the host target binding sites. As an illustration, FIG. 1 shows 3 such host target binding sites, designated BINDING SITE I, BINDING SITE II and BINDING SITE III respectively. It is appreciated that the number of host target binding sites shown in FIG. 1 is meant as an illustration only, and is not meant to be limiting VGAM255 RNA, herein designated VGAM RNA, may have a different number of host target binding sites in untranslated regions of a VGAM255 host target RNA, herein designated VGAM HOST TARGET RNA. It is further appreciated that while FIG. 1 depicts host target binding sites in the 3UTR region, this is meant as an example only these host target binding sites may be located in the 3UTR region, the 5UTR region, or in both 3UTR and 5UTR regions.

[3531] The complementary binding of VGAM255 RNA, herein designated VGAM RNA, to host target binding sites on VGAM255 host target RNA, herein designated VGAM HOST TARGET RNA, such as BINDING SITE I, BINDING SITE II and BINDING SITE III, inhibits translation of VGAM255 host target RNA, herein designated VGAM HOST TARGET RNA, into VGAM255 host target protein, herein designated VGAM HOST TARGET PROTEIN. VGAM host target protein is therefore outlined by a broken line.

[3532] It is appreciated that VGAM255 host target gene, herein designated VGAM HOST TARGET GENE, in fact represents a plurality of VGAM255 host target genes. The mRNA of each one of this plurality of VGAM255 host target genes comprises one or more host target binding sites, each having a nucleotide sequence which is at least partly complementary to VGAM255 RNA, herein designated VGAM RNA, and which when bound by VGAM255 RNA, herein designated VGAM RNA, causes inhibition of translation of respective one or more VGAM255 host target proteins.

[3533] It is further appreciated by one skilled in the art that the mode of translational inhibition illustrated by FIG. 1 with specific reference to translational inhibition exerted by VGAM255 gene, herein designated VGAM GENE, on one or more VGAM255 host target gene, herein designated VGAM HOST TARGET GENE, is in fact common to other known non-viral miRNA genes. As mentioned hereinabove with reference to the background section, although a specific complementary binding site has been demonstrated only for some of the known miRNA genes (primarily Lin-4 and Let-7), all other recently discovered miRNA genes are also believed by those skilled in the art to modulate expression of other genes by complementary binding, although specific complementary binding sites of these other miRNA genes have not yet been found (Ruvkun G., Perspective: Glimpses of a tiny RNA world, Science 294, 779 (2001)).

[3534] It is yet further appreciated that a function of VGAM255 is inhibition of expression of host target genes, as part of a novel viral mechanism of attacking a host. Accordingly, utilities of VGAM255 include diagnosis, prevention and treatment of viral infection by Vaccinia virus. Specific functions, and accordingly utilities, of VGAM255 correlate with, and may be deduced from, the identity of the host target genes which VGAM255 binds and inhibits, and the function of these host target genes, as elaborated hereinbelow.

[3535] Nucleotide sequences of the VGAM255 precursor RNA, herein designated VGAM PRECURSOR RNA, and of the diced VGAM255 RNA, herein designated VGAM RNA, and a schematic representation of the secondary folding of VGAM255 folded precursor RNA, herein designated VGAM FOLDED PRECURSOR RNA, of VGAM255 are further described hereinbelow with reference to Table 1.

[3536] Nucleotide sequences of host target binding sites, such as BINDING SITE-I, BINDING SITE-II and BINDING SITE-III of FIG. 1, found on, and schematic representation of the complementarity of each of these host target binding sites to VGAM255 RNA, herein designated VGAM RNA, are described hereinbelow with reference to Table 2.

[3537] FIG. 1 further provides a conceptual description of another novel bioinformatically detected viral gene of the present invention, referred to here as Viral Genomic Address Messenger 256 (VGAM256) viral gene, which modulates expression of respective host target genes thereof, the function and utility of which host target genes is known in the art.

[3538] VGAM256 is a novel bioinformatically detected regulatory, non protein coding, viral micro RNA (miRNA) gene. The method by which VGAM256 was detected is described hereinabove with reference to FIGS. 2-8.

[3539] VGAM256 gene, herein designated VGAM GENE, is a viral gene contained in the genome of Vaccinia virus. VGAM256 host target gene, herein designated VGAM HOST TARGET GENE, is a human gene contained in the human genome.

[3540] VGAM256 gene, herein designated VGAM GENE, encodes a VGAM256 precursor RNA, herein designated VGAM PRECURSOR RNA. Similar to other miRNA genes, and unlike most ordinary genes, VGAM256 precursor RNA, herein designated VGAM PRECURSOR RNA, does not encode a protein. A nucleotide sequence identical or highly similar to the nucleotide sequence of VGAM256 precursor RNA is designated SEQ ID:242, and is provided hereinbelow with reference to the sequence listing part. Nucleotide sequence SEQ ID:242 is located at position 143051 relative to the genome of Vaccinia virus.

[3541] VGAM256 precursor RNA, herein designated VGAM PRECURSOR RNA, folds onto itself, forming VGAM256 folded precursor RNA, herein designated VGAM FOLDED PRECURSOR RNA, which has a two-dimensional hairpin structure. As is well known in the art, this hairpin structure, is typical of RNA encoded by miRNA genes, and is due to the fact that the nucleotide sequence of the first half of the RNA encoded by a miRNA gene is an accurate or partial inversed-reversed sequence of the nucleotide sequence of the second half thereof.

[3542] An enzyme complex designated DICER COMPLEX, dices the VGAM256 folded precursor RNA, herein designated VGAM FOLDED PRECURSOR RNA, into VGAM256 RNA, herein designated VGAM RNA, a single stranded ˜22 nt long RNA segment. As is known in the art, dicing of a hairpin structured RNA precursor product into a short ˜22 nt RNA segment is catalyzed by an enzyme complex comprising an enzyme called Dicer together with other necessary proteins. A probable (over 85%) nucleotide sequence of VGAM256 RNA is designated SEQ ID:591, and is provided hereinbelow with reference to the sequence listing part.

[3543] VGAM256 host target gene, herein designated VGAM HOST TARGET GENE, encodes a corresponding messenger RNA, VGAM256 host target RNA, herein designated VGAM HOST TARGET RNA. VGAM256 host target RNA, herein designated VGAM HOST TARGET RNA, comprises three regions, as is typical of mRNA of a protein coding gene: a 5 untranslated region, a protein coding region and a 3 untranslated region, designated 5UTR, PROTEIN CODING and 3UTR respectively.

[3544] VGAM256 RNA, herein designated VGAM RNA, binds complementarily to one or more host target binding sites located in untranslated regions of VGAM256 host target RNA, herein designated VGAM HOST TARGET RNA. This complementary binding is due to the fact that the nucleotide sequence of VGAM256 RNA, herein designated VGAM RNA, is an accurate or a partial inversed-reversed sequence of the nucleotide sequence of each of the host target binding sites. As an illustration, FIG. 1 shows 3 such host target binding sites, designated BINDING SITE I, BINDING SITE II and BINDING SITE III respectively. It is appreciated that the number of host target binding sites shown in FIG. 1 is meant as an illustration only, and is not meant to be limiting VGAM256 RNA, herein designated VGAM RNA, may have a different number of host target binding sites in untranslated regions of a VGAM256 host target RNA, herein designated VGAM HOST TARGET RNA. It is further appreciated that while FIG. 1 depicts host target binding sites in the 3UTR region, this is meant as an example only these host target binding sites may be located in the 3UTR region, the 5UTR region, or in both 3UTR and 5UTR regions.

[3545] The complementary binding of VGAM256 RNA, herein designated VGAM RNA, to host target binding sites on VGAM256 host target RNA, herein designated VGAM HOST TARGET RNA, such as BINDING SITE I, BINDING SITE II and BINDING SITE III, inhibits translation of VGAM256 host target RNA, herein designated VGAM HOST TARGET RNA, into VGAM256 host target protein, herein designated VGAM HOST TARGET PROTEIN. VGAM host target protein is therefore outlined by a broken line.

[3546] It is appreciated that VGAM256 host target gene, herein designated VGAM HOST TARGET GENE, in fact represents a plurality of VGAM256 host target genes. The mRNA of each one of this plurality of VGAM256 host target genes comprises one or more host target binding sites, each having a nucleotide sequence which is at least partly complementary to VGAM256 RNA, herein designated VGAM RNA, and which when bound by VGAM256 RNA, herein designated VGAM RNA, causes inhibition of translation of respective one or more VGAM256 host target proteins.

[3547] It is further appreciated by one skilled in the art that the mode of translational inhibition illustrated by FIG. 1 with specific reference to translational inhibition exerted by VGAM256 gene, herein designated VGAM GENE, on one or more VGAM256 host target gene, herein designated VGAM HOST TARGET GENE, is in fact common to other known non-viral miRNA genes. As mentioned hereinabove with reference to the background section, although a specific complementary binding site has been demonstrated only for some of the known miRNA genes (primarily Lin-4 and Let-7), all other recently discovered miRNA genes are also believed by those skilled in the art to modulate expression of other genes by complementary binding, although specific complementary binding sites of these other miRNA genes have not yet been found (Ruvkun G., Perspective: Glimpses of a tiny RNA world, Science 294, 779 (2001)).

[3548] It is yet further appreciated that a function of VGAM256 is inhibition of expression of host target genes, as part of a novel viral mechanism of attacking a host. Accordingly, utilities of VGAM256 include diagnosis, prevention and treatment of viral infection by Vaccinia virus. Specific functions, and accordingly utilities, of VGAM256 correlate with, and may be deduced from, the identity of the host target genes which VGAM256 binds and inhibits, and the function of these host target genes, as elaborated hereinbelow.

[3549] Nucleotide sequences of the VGAM256 precursor RNA, herein designated VGAM PRECURSOR RNA, and of the diced VGAM256 RNA, herein designated VGAM RNA, and a schematic representation of the secondary folding of VGAM256 folded precursor RNA, herein designated VGAM FOLDED PRECURSOR RNA, of VGAM256 are further described hereinbelow with reference to Table 1.

[3550] Nucleotide sequences of host target binding sites, such as BINDING SITE-I, BINDING SITE-II and BINDING SITE-III of FIG. 1, found on, and schematic representation of the complementarity of each of these host target binding sites to VGAM256 RNA, herein designated VGAM RNA, are described hereinbelow with reference to Table 2.

[3551] FIG. 1 further provides a conceptual description of another novel bioinformatically detected viral gene of the present invention, referred to here as Viral Genomic Address Messenger 257 (VGAM257) viral gene, which modulates expression of respective host target genes thereof, the function and utility of which host target genes is known in the art.

[3552] VGAM257 is a novel bioinformatically detected regulatory, non protein coding, viral micro RNA (miRNA) gene. The method by which VGAM257 was detected is described hereinabove with reference to FIGS. 2-8.

[3553] VGAM257 gene, herein designated VGAM GENE, is a viral gene contained in the genome of Vaccinia virus. VGAM257 host target gene, herein designated VGAM HOST TARGET GENE, is a human gene contained in the human genome.

[3554] VGAM257 gene, herein designated VGAM GENE, encodes a VGAM257 precursor RNA, herein designated VGAM PRECURSOR RNA. Similar to other miRNA genes, and unlike most ordinary genes, VGAM257 precursor RNA, herein designated VGAM PRECURSOR RNA, does not encode a protein. A nucleotide sequence identical or highly similar to the nucleotide sequence of VGAM257 precursor RNA is designated SEQ ID:243, and is provided hereinbelow with reference to the sequence listing part. Nucleotide sequence SEQ ID:243 is located at position 142696 relative to the genome of Vaccinia virus.

[3555] VGAM257 precursor RNA, herein designated VGAM PRECURSOR RNA, folds onto itself, forming VGAM257 folded precursor RNA, herein designated VGAM FOLDED PRECURSOR RNA, which has a two-dimensional hairpin structure. As is well known in the art, this hairpin structure, is typical of RNA encoded by miRNA genes, and is due to the fact that the nucleotide sequence of the first half of the RNA encoded by a miRNA gene is an accurate or partial inversed-reversed sequence of the nucleotide sequence of the second half thereof.

[3556] An enzyme complex designated DICER COMPLEX, dices the VGAM257 folded precursor RNA, herein designated VGAM FOLDED PRECURSOR RNA, into VGAM257 RNA, herein designated VGAM RNA, a single stranded ˜22 nt long RNA segment. As is known in the art, dicing of a hairpin structured RNA precursor product into a short ˜22 nt RNA segment is catalyzed by an enzyme complex comprising an enzyme called Dicer together with other necessary proteins. A probable (over 82%) nucleotide sequence of VGAM257 RNA is designated SEQ ID:592, and is provided hereinbelow with reference to the sequence listing part.

[3557] VGAM257 host target gene, herein designated VGAM HOST TARGET GENE, encodes a corresponding messenger RNA, VGAM257 host target RNA, herein designated VGAM HOST TARGET RNA. VGAM257 host target RNA, herein designated VGAM HOST TARGET RNA, comprises three regions, as is typical of mRNA of a protein coding gene: a 5 untranslated region, a protein coding region and a 3 untranslated region, designated 5UTR, PROTEIN CODING and 3UTR respectively.

[3558] VGAM257 RNA, herein designated VGAM RNA, binds complementarily to one or more host target binding sites located in untranslated regions of VGAM257 host target RNA, herein designated VGAM HOST TARGET RNA. This complementary binding is due to the fact that the nucleotide sequence of VGAM257 RNA, herein designated VGAM RNA, is an accurate or a partial inversed-reversed sequence of the nucleotide sequence of each of the host target binding sites. As an illustration, FIG. 1 shows 3 such host target binding sites, designated BINDING SITE I, BINDING SITE II and BINDING SITE III respectively. It is appreciated that the number of host target binding sites shown in FIG. 1 is meant as an illustration only, and is not meant to be limiting VGAM257 RNA, herein designated VGAM RNA, may have a different number of host target binding sites in untranslated regions of a VGAM257 host target RNA, herein designated VGAM HOST TARGET RNA. It is further appreciated that while FIG. 1 depicts host target binding sites in the 3UTR region, this is meant as an example only these host target binding sites may be located in the 3UTR region, the 5UTR region, or in both 3UTR and 5UTR regions.

[3559] The complementary binding of VGAM257 RNA, herein designated VGAM RNA, to host target binding sites on VGAM257 host target RNA, herein designated VGAM HOST TARGET RNA, such as BINDING SITE I, BINDING SITE II and BINDING SITE III, inhibits translation of VGAM257 host target RNA, herein designated VGAM HOST TARGET RNA, into VGAM257 host target protein, herein designated VGAM HOST TARGET PROTEIN. VGAM host target protein is therefore outlined by a broken line.

[3560] It is appreciated that VGAM257 host target gene, herein designated VGAM HOST TARGET GENE, in fact represents a plurality of VGAM257 host target genes. The mRNA of each one of this plurality of VGAM257 host target genes comprises one or more host target binding sites, each having a nucleotide sequence which is at least partly complementary to VGAM257 RNA, herein designated VGAM RNA, and which when bound by VGAM257 RNA, herein designated VGAM RNA, causes inhibition of translation of respective one or more VGAM257 host target proteins.

[3561] It is further appreciated by one skilled in the art that the mode of translational inhibition illustrated by FIG. 1 with specific reference to translational inhibition exerted by VGAM257 gene, herein designated VGAM GENE, on one or more VGAM257 host target gene, herein designated VGAM HOST TARGET GENE, is in fact common to other known non-viral miRNA genes. As mentioned hereinabove with reference to the background section, although a specific complementary binding site has been demonstrated only for some of the known miRNA genes (primarily Lin-4 and Let-7), all other recently discovered miRNA genes are also believed by those skilled in the art to modulate expression of other genes by complementary binding, although specific complementary binding sites of these other miRNA genes have not yet been found (Ruvkun G., Perspective: Glimpses of a tiny RNA world, Science 294, 779 (2001)).

[3562] It is yet further appreciated that a function of VGAM257 is inhibition of expression of host target genes, as part of a novel viral mechanism of attacking a host. Accordingly, utilities of VGAM257 include diagnosis, prevention and treatment of viral infection by Vaccinia virus. Specific functions, and accordingly utilities, of VGAM257 correlate with, and may be deduced from, the identity of the host target genes which VGAM257 binds and inhibits, and the function of these host target genes, as elaborated hereinbelow.

[3563] Nucleotide sequences of the VGAM257 precursor RNA, herein designated VGAM PRECURSOR RNA, and of the diced VGAM257 RNA, herein designated VGAM RNA, and a schematic representation of the secondary folding of VGAM257 folded precursor RNA, herein designated VGAM FOLDED PRECURSOR RNA, of VGAM257 are further described hereinbelow with reference to Table 1.

[3564] Nucleotide sequences of host target binding sites, such as BINDING SITE-I, BINDING SITE-II and BINDING SITE-III of FIG. 1, found on, and schematic representation of the complementarity of each of these host target binding sites to VGAM257 RNA, herein designated VGAM RNA, are described hereinbelow with reference to Table 2.

[3565] FIG. 1 further provides a conceptual description of another novel bioinformatically detected viral gene of the present invention, referred to here as Viral Genomic Address Messenger 258 (VGAM258) viral gene, which modulates expression of respective host target genes thereof, the function and utility of which host target genes is known in the art.

[3566] VGAM258 is a novel bioinformatically detected regulatory, non protein coding, viral micro RNA (miRNA) gene. The method by which VGAM258 was detected is described hereinabove with reference to FIGS. 2-8.

[3567] VGAM258 gene, herein designated VGAM GENE, is a viral gene contained in the genome of Vaccinia virus. VGAM258 host target gene, herein designated VGAM HOST TARGET GENE, is a human gene contained in the human genome.

[3568] VGAM258 gene, herein designated VGAM GENE, encodes a VGAM258 precursor RNA, herein designated VGAM PRECURSOR RNA. Similar to other miRNA genes, and unlike most ordinary genes, VGAM258 precursor RNA, herein designated VGAM PRECURSOR RNA, does not encode a protein. A nucleotide sequence identical or highly similar to the nucleotide sequence of VGAM258 precursor RNA is designated SEQ ID:244, and is provided hereinbelow with reference to the sequence listing part. Nucleotide sequence SEQ ID:244 is located at position 141997 relative to the genome of Vaccinia virus.

[3569] VGAM258 precursor RNA, herein designated VGAM PRECURSOR RNA, folds onto itself, forming VGAM258 folded precursor RNA, herein designated VGAM FOLDED PRECURSOR RNA, which has a two-dimensional hairpin structure. As is well known in the art, this hairpin structure, is typical of RNA encoded by miRNA genes, and is due to the fact that the nucleotide sequence of the first half of the RNA encoded by a miRNA gene is an accurate or partial inversed-reversed sequence of the nucleotide sequence of the second half thereof.

[3570] An enzyme complex designated DICER COMPLEX, dices the VGAM258 folded precursor RNA, herein designated VGAM FOLDED PRECURSOR RNA, into VGAM258 RNA, herein designated VGAM RNA, a single stranded ˜22 nt long RNA segment. As is known in the art, dicing of a hairpin structured RNA precursor product into a short ˜22 nt RNA segment is catalyzed by an enzyme complex comprising an enzyme called Dicer together with other necessary proteins. A probable (over 88%) nucleotide sequence of VGAM258 RNA is designated SEQ ID:593, and is provided hereinbelow with reference to the sequence listing part.

[3571] VGAM258 host target gene, herein designated VGAM HOST TARGET GENE, encodes a corresponding messenger RNA, VGAM258 host target RNA, herein designated VGAM HOST TARGET RNA. VGAM258 host target RNA, herein designated VGAM HOST TARGET RNA, comprises three regions, as is typical of mRNA of a protein coding gene: a 5 untranslated region, a protein coding region and a 3 untranslated region, designated 5UTR, PROTEIN CODING and 3UTR respectively.

[3572] VGAM258 RNA, herein designated VGAM RNA, binds complementarily to one or more host target binding sites located in untranslated regions of VGAM258 host target RNA, herein designated VGAM HOST TARGET RNA. This complementary binding is due to the fact that the nucleotide sequence of VGAM258 RNA, herein designated VGAM RNA, is an accurate or a partial inversed-reversed sequence of the nucleotide sequence of each of the host target binding sites. As an illustration, FIG. 1 shows 3 such host target binding sites, designated BINDING SITE I, BINDING SITE II and BINDING SITE III respectively. It is appreciated that the number of host target binding sites shown in FIG. 1 is meant as an illustration only, and is not meant to be limiting VGAM258 RNA, herein designated VGAM RNA, may have a different number of host target binding sites in untranslated regions of a VGAM258 host target RNA, herein designated VGAM HOST TARGET RNA. It is further appreciated that while FIG. 1 depicts host target binding sites in the 3UTR region, this is meant as an example only these host target binding sites may be located in the 3UTR region, the 5UTR region, or in both 3UTR and 5UTR regions.

[3573] The complementary binding of VGAM258 RNA, herein designated VGAM RNA, to host target binding sites on VGAM258 host target RNA, herein designated VGAM HOST TARGET RNA, such as BINDING SITE I, BINDING SITE II and BINDING SITE III, inhibits translation of VGAM258 host target RNA, herein designated VGAM HOST TARGET RNA, into VGAM258 host target protein, herein designated VGAM HOST TARGET PROTEIN. VGAM host target protein is therefore outlined by a broken line.

[3574] It is appreciated that VGAM258 host target gene, herein designated VGAM HOST TARGET GENE, in fact represents a plurality of VGAM258 host target genes. The mRNA of each one of this plurality of VGAM258 host target genes comprises one or more host target binding sites, each having a nucleotide sequence which is at least partly complementary to VGAM258 RNA, herein designated VGAM RNA, and which when bound by VGAM258 RNA, herein designated VGAM RNA, causes inhibition of translation of respective one or more VGAM258 host target proteins.

[3575] It is further appreciated by one skilled in the art that the mode of translational inhibition illustrated by FIG. 1 with specific reference to translational inhibition exerted by VGAM258 gene, herein designated VGAM GENE, on one or more VGAM258 host target gene, herein designated VGAM HOST TARGET GENE, is in fact common to other known non-viral miRNA genes. As mentioned hereinabove with reference to the background section, although a specific complementary binding site has been demonstrated only for some of the known miRNA genes (primarily Lin-4 and Let-7), all other recently discovered miRNA genes are also believed by those skilled in the art to modulate expression of other genes by complementary binding, although specific complementary binding sites of these other miRNA genes have not yet been found (Ruvkun G., Perspective: Glimpses of a tiny RNA world, Science 294, 779 (2001)).

[3576] It is yet further appreciated that a function of VGAM258 is inhibition of expression of host target genes, as part of a novel viral mechanism of attacking a host. Accordingly, utilities of VGAM258 include diagnosis, prevention and treatment of viral infection by Vaccinia virus. Specific functions, and accordingly utilities, of VGAM258 correlate with, and may be deduced from, the identity of the host target genes which VGAM258 binds and inhibits, and the function of these host target genes, as elaborated hereinbelow.

[3577] Nucleotide sequences of the VGAM258 precursor RNA, herein designated VGAM PRECURSOR RNA, and of the diced VGAM258 RNA, herein designated VGAM RNA, and a schematic representation of the secondary folding of VGAM258 folded precursor RNA, herein designated VGAM FOLDED PRECURSOR RNA, of VGAM258 are further described hereinbelow with reference to Table 1.

[3578] Nucleotide sequences of host target binding sites, such as BINDING SITE-I, BINDING SITE-II and BINDING SITE-III of FIG. 1, found on, and schematic representation of the complementarity of each of these host target binding sites to VGAM258 RNA, herein designated VGAM RNA, are described hereinbelow with reference to Table 2.

[3579] FIG. 1 further provides a conceptual description of another novel bioinformatically detected viral gene of the present invention, referred to here as Viral Genomic Address Messenger 259 (VGAM259) viral gene, which modulates expression of respective host target genes thereof, the function and utility of which host target genes is known in the art.

[3580] VGAM259 is a novel bioinformatically detected regulatory, non protein coding, viral micro RNA (miRNA) gene. The method by which VGAM259 was detected is described hereinabove with reference to FIGS. 2-8.

[3581] VGAM259 gene, herein designated VGAM GENE, is a viral gene contained in the genome of Vaccinia virus. VGAM259 host target gene, herein designated VGAM HOST TARGET GENE, is a human gene contained in the human genome.

[3582] VGAM259 gene, herein designated VGAM GENE, encodes a VGAM259 precursor RNA, herein designated VGAM PRECURSOR RNA. Similar to other miRNA genes, and unlike most ordinary genes, VGAM259 precursor RNA, herein designated VGAM PRECURSOR RNA, does not encode a protein. A nucleotide sequence identical or highly similar to the nucleotide sequence of VGAM259 precursor RNA is designated SEQ ID:245, and is provided hereinbelow with reference to the sequence listing part. Nucleotide sequence SEQ ID:245 is located at position 144258 relative to the genome of Vaccinia virus.

[3583] VGAM259 precursor RNA, herein designated VGAM PRECURSOR RNA, folds onto itself, forming VGAM259 folded precursor RNA, herein designated VGAM FOLDED PRECURSOR RNA, which has a two-dimensional hairpin structure. As is well known in the art, this hairpin structure, is typical of RNA encoded by miRNA genes, and is due to the fact that the nucleotide sequence of the first half of the RNA encoded by a miRNA gene is an accurate or partial inversed-reversed sequence of the nucleotide sequence of the second half thereof.

[3584] An enzyme complex designated DICER COMPLEX, dices the VGAM259 folded precursor RNA, herein designated VGAM FOLDED PRECURSOR RNA, into VGAM259 RNA, herein designated VGAM RNA, a single stranded ˜22 nt long RNA segment. As is known in the art, dicing of a hairpin structured RNA precursor product into a short ˜22 nt RNA segment is catalyzed by an enzyme complex comprising an enzyme called Dicer together with other necessary proteins. A probable (over 25%) nucleotide sequence of VGAM259 RNA is designated SEQ ID:594, and is provided hereinbelow with reference to the sequence listing part.

[3585] VGAM259 host target gene, herein designated VGAM HOST TARGET GENE, encodes a corresponding messenger RNA, VGAM259 host target RNA, herein designated VGAM HOST TARGET RNA. VGAM259 host target RNA, herein designated VGAM HOST TARGET RNA, comprises three regions, as is typical of mRNA of a protein coding gene: a 5 untranslated region, a protein coding region and a 3 untranslated region, designated 5UTR, PROTEIN CODING and 3UTR respectively.

[3586] VGAM259 RNA, herein designated VGAM RNA, binds complementarily to one or more host target binding sites located in untranslated regions of VGAM259 host target RNA, herein designated VGAM HOST TARGET RNA. This complementary binding is due to the fact that the nucleotide sequence of VGAM259 RNA, herein designated VGAM RNA, is an accurate or a partial inversed-reversed sequence of the nucleotide sequence of each of the host target binding sites. As an illustration, FIG. 1 shows 3 such host target binding sites, designated BINDING SITE I, BINDING SITE II and BINDING SITE III respectively. It is appreciated that the number of host target binding sites shown in FIG. 1 is meant as an illustration only, and is not meant to be limiting VGAM259 RNA, herein designated VGAM RNA, may have a different number of host target binding sites in untranslated regions of a VGAM259 host target RNA, herein designated VGAM HOST TARGET RNA. It is further appreciated that while FIG. 1 depicts host target binding sites in the 3UTR region, this is meant as an example only these host target binding sites may be located in the 3UTR region, the 5UTR region, or in both 3UTR and 5UTR regions.

[3587] The complementary binding of VGAM259 RNA, herein designated VGAM RNA, to host target binding sites on VGAM259 host target RNA, herein designated VGAM HOST TARGET RNA, such as BINDING SITE I, BINDING SITE II and BINDING SITE III, inhibits translation of VGAM259 host target RNA, herein designated VGAM HOST TARGET RNA, into VGAM259 host target protein, herein designated VGAM HOST TARGET PROTEIN. VGAM host target protein is therefore outlined by a broken line.

[3588] It is appreciated that VGAM259 host target gene, herein designated VGAM HOST TARGET GENE, in fact represents a plurality of VGAM259 host target genes. The mRNA of each one of this plurality of VGAM259 host target genes comprises one or more host target binding sites, each having a nucleotide sequence which is at least partly complementary to VGAM259 RNA, herein designated VGAM RNA, and which when bound by VGAM259 RNA, herein designated VGAM RNA, causes inhibition of translation of respective one or more VGAM259 host target proteins.

[3589] It is further appreciated by one skilled in the art that the mode of translational inhibition illustrated by FIG. 1 with specific reference to translational inhibition exerted by VGAM259 gene, herein designated VGAM GENE, on one or more VGAM259 host target gene, herein designated VGAM HOST TARGET GENE, is in fact common to other known non-viral miRNA genes. As mentioned hereinabove with reference to the background section, although a specific complementary binding site has been demonstrated only for some of the known miRNA genes (primarily Lin-4 and Let-7), all other recently discovered miRNA genes are also believed by those skilled in the art to modulate expression of other genes by complementary binding, although specific complementary binding sites of these other miRNA genes have not yet been found (Ruvkun G., Perspective: Glimpses of a tiny RNA world, Science 294, 779 (2001)).

[3590] It is yet further appreciated that a function of VGAM259 is inhibition of expression of host target genes, as part of a novel viral mechanism of attacking a host. Accordingly, utilities of VGAM259 include diagnosis, prevention and treatment of viral infection by Vaccinia virus. Specific functions, and accordingly utilities, of VGAM259 correlate with, and may be deduced from, the identity of the host target genes which VGAM259 binds and inhibits, and the function of these host target genes, as elaborated hereinbelow.

[3591] Nucleotide sequences of the VGAM259 precursor RNA, herein designated VGAM PRECURSOR RNA, and of the diced VGAM259 RNA, herein designated VGAM RNA, and a schematic representation of the secondary folding of VGAM259 folded precursor RNA, herein designated VGAM FOLDED PRECURSOR RNA, of VGAM259 are further described hereinbelow with reference to Table 1.

[3592] Nucleotide sequences of host target binding sites, such as BINDING SITE-I, BINDING SITE-II and BINDING SITE-III of FIG. 1, found on, and schematic representation of the complementarity of each of these host target binding sites to VGAM259 RNA, herein designated VGAM RNA, are described hereinbelow with reference to Table 2.

[3593] FIG. 1 further provides a conceptual description of another novel bioinformatically detected viral gene of the present invention, referred to here as Viral Genomic Address Messenger 260 (VGAM260) viral gene, which modulates expression of respective host target genes thereof, the function and utility of which host target genes is known in the art.

[3594] VGAM260 is a novel bioinformatically detected regulatory, non protein coding, viral micro RNA (miRNA) gene. The method by which VGAM260 was detected is described hereinabove with reference to FIGS. 2-8.

[3595] VGAM260 gene, herein designated VGAM GENE, is a viral gene contained in the genome of Vaccinia virus. VGAM260 host target gene, herein designated VGAM HOST TARGET GENE, is a human gene contained in the human genome.

[3596] VGAM260 gene, herein designated VGAM GENE, encodes a VGAM260 precursor RNA, herein designated VGAM PRECURSOR RNA. Similar to other miRNA genes, and unlike most ordinary genes, VGAM260 precursor RNA, herein designated VGAM PRECURSOR RNA, does not encode a protein. A nucleotide sequence identical or highly similar to the nucleotide sequence of VGAM260 precursor RNA is designated SEQ ID:246, and is provided hereinbelow with reference to the sequence listing part. Nucleotide sequence SEQ ID:246 is located at position 145827 relative to the genome of Vaccinia virus.

[3597] VGAM260 precursor RNA, herein designated VGAM PRECURSOR RNA, folds onto itself, forming VGAM260 folded precursor RNA, herein designated VGAM FOLDED PRECURSOR RNA, which has a two-dimensional hairpin structure. As is well known in the art, this hairpin structure, is typical of RNA encoded by miRNA genes, and is due to the fact that the nucleotide sequence of the first half of the RNA encoded by a miRNA gene is an accurate or partial inversed-reversed sequence of the nucleotide sequence of the second half thereof.

[3598] An enzyme complex designated DICER COMPLEX, dices the VGAM260 folded precursor RNA, herein designated VGAM FOLDED PRECURSOR RNA, into VGAM260 RNA, herein designated VGAM RNA, a single stranded ˜22 nt long RNA segment. As is known in the art, dicing of a hairpin structured RNA precursor product into a short ˜22 nt RNA segment is catalyzed by an enzyme complex comprising an enzyme called Dicer together with other necessary proteins. A probable (over 89%) nucleotide sequence of VGAM260 RNA is designated SEQ ID:595, and is provided hereinbelow with reference to the sequence listing part.

[3599] VGAM260 host target gene, herein designated VGAM HOST TARGET GENE, encodes a corresponding messenger RNA, VGAM260 host target RNA, herein designated VGAM HOST TARGET RNA. VGAM260 host target RNA, herein designated VGAM HOST TARGET RNA, comprises three regions, as is typical of mRNA of a protein coding gene: a 5 untranslated region, a protein coding region and a 3 untranslated region, designated 5UTR, PROTEIN CODING and 3UTR respectively.

[3600] VGAM260 RNA, herein designated VGAM RNA, binds complementarily to one or more host target binding sites located in untranslated regions of VGAM260 host target RNA, herein designated VGAM HOST TARGET RNA. This complementary binding is due to the fact that the nucleotide sequence of VGAM260 RNA, herein designated VGAM RNA, is an accurate or a partial inversed-reversed sequence of the nucleotide sequence of each of the host target binding sites. As an illustration, FIG. 1 shows 3 such host target binding sites, designated BINDING SITE I, BINDING SITE II and BINDING SITE III respectively. It is appreciated that the number of host target binding sites shown in FIG. 1 is meant as an illustration only, and is not meant to be limiting VGAM260 RNA, herein designated VGAM RNA, may have a different number of host target binding sites in untranslated regions of a VGAM260 host target RNA, herein designated VGAM HOST TARGET RNA. It is further appreciated that while FIG. 1 depicts host target binding sites in the 3UTR region, this is meant as an example only these host target binding sites may be located in the 3UTR region, the 5UTR region, or in both 3UTR and 5UTR regions.

[3601] The complementary binding of VGAM260 RNA, herein designated VGAM RNA, to host target binding sites on VGAM260 host target RNA, herein designated VGAM HOST TARGET RNA, such as BINDING SITE I, BINDING SITE II and BINDING SITE III, inhibits translation of VGAM260 host target RNA, herein designated VGAM HOST TARGET RNA, into VGAM260 host target protein, herein designated VGAM HOST TARGET PROTEIN. VGAM host target protein is therefore outlined by a broken line.

[3602] It is appreciated that VGAM260 host target gene, herein designated VGAM HOST TARGET GENE, in fact represents a plurality of VGAM260 host target genes. The mRNA of each one of this plurality of VGAM260 host target genes comprises one or more host target binding sites, each having a nucleotide sequence which is at least partly complementary to VGAM260 RNA, herein designated VGAM RNA, and which when bound by VGAM260 RNA, herein designated VGAM RNA, causes inhibition of translation of respective one or more VGAM260 host target proteins.

[3603] It is further appreciated by one skilled in the art that the mode of translational inhibition illustrated by FIG. 1 with specific reference to translational inhibition exerted by VGAM260 gene, herein designated VGAM GENE, on one or more VGAM260 host target gene, herein designated VGAM HOST TARGET GENE, is in fact common to other known non-viral miRNA genes. As mentioned hereinabove with reference to the background section, although a specific complementary binding site has been demonstrated only for some of the known miRNA genes (primarily Lin-4 and Let-7), all other recently discovered miRNA genes are also believed by those skilled in the art to modulate expression of other genes by complementary binding, although specific complementary binding sites of these other miRNA genes have not yet been found (Ruvkun G., Perspective: Glimpses of a tiny RNA world, Science 294, 779 (2001)).

[3604] It is yet further appreciated that a function of VGAM260 is inhibition of expression of host target genes, as part of a novel viral mechanism of attacking a host. Accordingly, utilities of VGAM260 include diagnosis, prevention and treatment of viral infection by Vaccinia virus. Specific functions, and accordingly utilities, of VGAM260 correlate with, and may be deduced from, the identity of the host target genes which VGAM260 binds and inhibits, and the function of these host target genes, as elaborated hereinbelow.

[3605] Nucleotide sequences of the VGAM260 precursor RNA, herein designated VGAM PRECURSOR RNA, and of the diced VGAM260 RNA, herein designated VGAM RNA, and a schematic representation of the secondary folding of VGAM260 folded precursor RNA, herein designated VGAM FOLDED PRECURSOR RNA, of VGAM260 are further described hereinbelow with reference to Table 1.

[3606] Nucleotide sequences of host target binding sites, such as BINDING SITE-I, BINDING SITE-II and BINDING SITE-III of FIG. 1, found on, and schematic representation of the complementarity of each of these host target binding sites to VGAM260 RNA, herein designated VGAM RNA, are described hereinbelow with reference to Table 2.

[3607] FIG. 1 further provides a conceptual description of another novel bioinformatically detected viral gene of the present invention, referred to here as Viral Genomic Address Messenger 261 (VGAM261) viral gene, which modulates expression of respective host target genes thereof, the function and utility of which host target genes is known in the art.

[3608] VGAM261 is a novel bioinformatically detected regulatory, non protein coding, viral micro RNA (miRNA) gene. The method by which VGAM261 was detected is described hereinabove with reference to FIGS. 2-8.

[3609] VGAM261 gene, herein designated VGAM GENE, is a viral gene contained in the genome of Vaccinia virus. VGAM261 host target gene, herein designated VGAM HOST TARGET GENE, is a human gene contained in the human genome.

[3610] VGAM261 gene, herein designated VGAM GENE, encodes a VGAM261 precursor RNA, herein designated VGAM PRECURSOR RNA. Similar to other miRNA genes, and unlike most ordinary genes, VGAM261 precursor RNA, herein designated VGAM PRECURSOR RNA, does not encode a protein. A nucleotide sequence identical or highly similar to the nucleotide sequence of VGAM261 precursor RNA is designated SEQ ID:247, and is provided hereinbelow with reference to the sequence listing part. Nucleotide sequence SEQ ID:247 is located at position 145163 relative to the genome of Vaccinia virus.

[3611] VGAM261 precursor RNA, herein designated VGAM PRECURSOR RNA, folds onto itself, forming VGAM261 folded precursor RNA, herein designated VGAM FOLDED PRECURSOR RNA, which has a two-dimensional hairpin structure. As is well known in the art, this hairpin structure, is typical of RNA encoded by miRNA genes, and is due to the fact that the nucleotide sequence of the first half of the RNA encoded by a miRNA gene is an accurate or partial inversed-reversed sequence of the nucleotide sequence of the second half thereof.

[3612] An enzyme complex designated DICER COMPLEX, dices the VGAM261 folded precursor RNA, herein designated VGAM FOLDED PRECURSOR RNA, into VGAM261 RNA, herein designated VGAM RNA, a single stranded ˜22 nt long RNA segment. As is known in the art, dicing of a hairpin structured RNA precursor product into a short ˜22 nt RNA segment is catalyzed by an enzyme complex comprising an enzyme called Dicer together with other necessary proteins. A probable (over 78%) nucleotide sequence of VGAM261 RNA is designated SEQ ID:596, and is provided hereinbelow with reference to the sequence listing part.

[3613] VGAM261 host target gene, herein designated VGAM HOST TARGET GENE, encodes a corresponding messenger RNA, VGAM261 host target RNA, herein designated VGAM HOST TARGET RNA. VGAM261 host target RNA, herein designated VGAM HOST TARGET RNA, comprises three regions, as is typical of mRNA of a protein coding gene: a 5 untranslated region, a protein coding region and a 3 untranslated region, designated 5UTR, PROTEIN CODING and 3UTR respectively.

[3614] VGAM261 RNA, herein designated VGAM RNA, binds complementarily to one or more host target binding sites located in untranslated regions of VGAM261 host target RNA, herein designated VGAM HOST TARGET RNA. This complementary binding is due to the fact that the nucleotide sequence of VGAM261 RNA, herein designated VGAM RNA, is an accurate or a partial inversed-reversed sequence of the nucleotide sequence of each of the host target binding sites. As an illustration, FIG. 1 shows 3 such host target binding sites, designated BINDING SITE I, BINDING SITE II and BINDING SITE III respectively. It is appreciated that the number of host target binding sites shown in FIG. 1 is meant as an illustration only, and is not meant to be limiting VGAM261 RNA, herein designated VGAM RNA, may have a different number of host target binding sites in untranslated regions of a VGAM261 host target RNA, herein designated VGAM HOST TARGET RNA. It is further appreciated that while FIG. 1 depicts host target binding sites in the 3UTR region, this is meant as an example only these host target binding sites may be located in the 3UTR region, the 5UTR region, or in both 3UTR and 5UTR regions.

[3615] The complementary binding of VGAM261 RNA, herein designated VGAM RNA, to host target binding sites on VGAM261 host target RNA, herein designated VGAM HOST TARGET RNA, such as BINDING SITE I, BINDING SITE II and BINDING SITE III, inhibits translation of VGAM261 host target RNA, herein designated VGAM HOST TARGET RNA, into VGAM261 host target protein, herein designated VGAM HOST TARGET PROTEIN. VGAM host target protein is therefore outlined by a broken line.

[3616] It is appreciated that VGAM261 host target gene, herein designated VGAM HOST TARGET GENE, in fact represents a plurality of VGAM261 host target genes. The mRNA of each one of this plurality of VGAM261 host target genes comprises one or more host target binding sites, each having a nucleotide sequence which is at least partly complementary to VGAM261 RNA, herein designated VGAM RNA, and which when bound by VGAM261 RNA, herein designated VGAM RNA, causes inhibition of translation of respective one or more VGAM261 host target proteins.

[3617] It is further appreciated by one skilled in the art that the mode of translational inhibition illustrated by FIG. 1 with specific reference to translational inhibition exerted by VGAM261 gene, herein designated VGAM GENE, on one or more VGAM261 host target gene, herein designated VGAM HOST TARGET GENE, is in fact common to other known non-viral miRNA genes. As mentioned hereinabove with reference to the background section, although a specific complementary binding site has been demonstrated only for some of the known miRNA genes (primarily Lin-4 and Let-7), all other recently discovered miRNA genes are also believed by those skilled in the art to modulate expression of other genes by complementary binding, although specific complementary binding sites of these other miRNA genes have not yet been found (Ruvkun G., Perspective: Glimpses of a tiny RNA world, Science 294, 779 (2001)).

[3618] It is yet further appreciated that a function of VGAM261 is inhibition of expression of host target genes, as part of a novel viral mechanism of attacking a host. Accordingly, utilities of VGAM261 include diagnosis, prevention and treatment of viral infection by Vaccinia virus. Specific functions, and accordingly utilities, of VGAM261 correlate with, and may be deduced from, the identity of the host target genes which VGAM261 binds and inhibits, and the function of these host target genes, as elaborated hereinbelow.

[3619] Nucleotide sequences of the VGAM261 precursor RNA, herein designated VGAM PRECURSOR RNA, and of the diced VGAM261 RNA, herein designated VGAM RNA, and a schematic representation of the secondary folding of VGAM261 folded precursor RNA, herein designated VGAM FOLDED PRECURSOR RNA, of VGAM261 are further described hereinbelow with reference to Table 1.

[3620] Nucleotide sequences of host target binding sites, such as BINDING SITE-I, BINDING SITE-II and BINDING SITE-III of FIG. 1, found on, and schematic representation of the complementarity of each of these host target binding sites to VGAM261 RNA, herein designated VGAM RNA, are described hereinbelow with reference to Table 2.

[3621] FIG. 1 further provides a conceptual description of another novel bioinformatically detected viral gene of the present invention, referred to here as Viral Genomic Address Messenger 262 (VGAM262) viral gene, which modulates expression of respective host target genes thereof, the function and utility of which host target genes is known in the art.

[3622] VGAM262 is a novel bioinformatically detected regulatory, non protein coding, viral micro RNA (miRNA) gene. The method by which VGAM262 was detected is described hereinabove with reference to FIGS. 2-8.

[3623] VGAM262 gene, herein designated VGAM GENE, is a viral gene contained in the genome of Vaccinia virus. VGAM262 host target gene, herein designated VGAM HOST TARGET GENE, is a human gene contained in the human genome.

[3624] VGAM262 gene, herein designated VGAM GENE, encodes a VGAM262 precursor RNA, herein designated VGAM PRECURSOR RNA. Similar to other miRNA genes, and unlike most ordinary genes, VGAM262 precursor RNA, herein designated VGAM PRECURSOR RNA, does not encode a protein. A nucleotide sequence identical or highly similar to the nucleotide sequence of VGAM262 precursor RNA is designated SEQ ID:248, and is provided hereinbelow with reference to the sequence listing part. Nucleotide sequence SEQ ID:248 is located at position 147193 relative to the genome of Vaccinia virus.

[3625] VGAM262 precursor RNA, herein designated VGAM PRECURSOR RNA, folds onto itself, forming VGAM262 folded precursor RNA, herein designated VGAM FOLDED PRECURSOR RNA, which has a two-dimensional hairpin structure. As is well known in the art, this hairpin structure, is typical of RNA encoded by miRNA genes, and is due to the fact that the nucleotide sequence of the first half of the RNA encoded by a miRNA gene is an accurate or partial inversed-reversed sequence of the nucleotide sequence of the second half thereof.

[3626] An enzyme complex designated DICER COMPLEX, dices the VGAM262 folded precursor RNA, herein designated VGAM FOLDED PRECURSOR RNA, into VGAM262 RNA, herein designated VGAM RNA, a single stranded ˜22 nt long RNA segment. As is known in the art, dicing of a hairpin structured RNA precursor product into a short ˜22 nt RNA segment is catalyzed by an enzyme complex comprising an enzyme called Dicer together with other necessary proteins. A probable (over 85%) nucleotide sequence of VGAM262 RNA is designated SEQ ID:597, and is provided hereinbelow with reference to the sequence listing part.

[3627] VGAM262 host target gene, herein designated VGAM HOST TARGET GENE, encodes a corresponding messenger RNA, VGAM262 host target RNA, herein designated VGAM HOST TARGET RNA. VGAM262 host target RNA, herein designated VGAM HOST TARGET RNA, comprises three regions, as is typical of mRNA of a protein coding gene: a 5 untranslated region, a protein coding region and a 3 untranslated region, designated 5UTR, PROTEIN CODING and 3UTR respectively.

[3628] VGAM262 RNA, herein designated VGAM RNA, binds complementarily to one or more host target binding sites located in untranslated regions of VGAM262 host target RNA, herein designated VGAM HOST TARGET RNA. This complementary binding is due to the fact that the nucleotide sequence of VGAM262 RNA, herein designated VGAM RNA, is an accurate or a partial inversed-reversed sequence of the nucleotide sequence of each of the host target binding sites. As an illustration, FIG. 1 shows 3 such host target binding sites, designated BINDING SITE I, BINDING SITE II and BINDING SITE III respectively. It is appreciated that the number of host target binding sites shown in FIG. 1 is meant as an illustration only, and is not meant to be limiting VGAM262 RNA, herein designated VGAM RNA, may have a different number of host target binding sites in untranslated regions of a VGAM262 host target RNA, herein designated VGAM HOST TARGET RNA. It is further appreciated that while FIG. 1 depicts host target binding sites in the 3UTR region, this is meant as an example only these host target binding sites may be located in the 3UTR region, the 5UTR region, or in both 3UTR and 5UTR regions.

[3629] The complementary binding of VGAM262 RNA, herein designated VGAM RNA, to host target binding sites on VGAM262 host target RNA, herein designated VGAM HOST TARGET RNA, such as BINDING SITE I, BINDING SITE II and BINDING SITE III, inhibits translation of VGAM262 host target RNA, herein designated VGAM HOST TARGET RNA, into VGAM262 host target protein, herein designated VGAM HOST TARGET PROTEIN. VGAM host target protein is therefore outlined by a broken line.

[3630] It is appreciated that VGAM262 host target gene, herein designated VGAM HOST TARGET GENE, in fact represents a plurality of VGAM262 host target genes. The mRNA of each one of this plurality of VGAM262 host target genes comprises one or more host target binding sites, each having a nucleotide sequence which is at least partly complementary to VGAM262 RNA, herein designated VGAM RNA, and which when bound by VGAM262 RNA, herein designated VGAM RNA, causes inhibition of translation of respective one or more VGAM262 host target proteins.

[3631] It is further appreciated by one skilled in the art that the mode of translational inhibition illustrated by FIG. 1 with specific reference to translational inhibition exerted by VGAM262 gene, herein designated VGAM GENE, on one or more VGAM262 host target gene, herein designated VGAM HOST TARGET GENE, is in fact common to other known non-viral miRNA genes. As mentioned hereinabove with reference to the background section, although a specific complementary binding site has been demonstrated only for some of the known miRNA genes (primarily Lin-4 and Let-7), all other recently discovered miRNA genes are also believed by those skilled in the art to modulate expression of other genes by complementary binding, although specific complementary binding sites of these other miRNA genes have not yet been found (Ruvkun G., Perspective: Glimpses of a tiny RNA world, Science 294, 779 (2001)).

[3632] It is yet further appreciated that a function of VGAM262 is inhibition of expression of host target genes, as part of a novel viral mechanism of attacking a host. Accordingly, utilities of VGAM262 include diagnosis, prevention and treatment of viral infection by Vaccinia virus. Specific functions, and accordingly utilities, of VGAM262 correlate with, and may be deduced from, the identity of the host target genes which VGAM262 binds and inhibits, and the function of these host target genes, as elaborated hereinbelow.

[3633] Nucleotide sequences of the VGAM262 precursor RNA, herein designated VGAM PRECURSOR RNA, and of the diced VGAM262 RNA, herein designated VGAM RNA, and a schematic representation of the secondary folding of VGAM262 folded precursor RNA, herein designated VGAM FOLDED PRECURSOR RNA, of VGAM262 are further described hereinbelow with reference to Table 1.

[3634] Nucleotide sequences of host target binding sites, such as BINDING SITE-I, BINDING SITE-II and BINDING SITE-III of FIG. 1, found on, and schematic representation of the complementarity of each of these host target binding sites to VGAM262 RNA, herein designated VGAM RNA, are described hereinbelow with reference to Table 2.

[3635] FIG. 1 further provides a conceptual description of another novel bioinformatically detected viral gene of the present invention, referred to here as Viral Genomic Address Messenger 263 (VGAM263) viral gene, which modulates expression of respective host target genes thereof, the function and utility of which host target genes is known in the art.

[3636] VGAM263 is a novel bioinformatically detected regulatory, non protein coding, viral micro RNA (miRNA) gene. The method by which VGAM263 was detected is described hereinabove with reference to FIGS. 2-8.

[3637] VGAM263 gene, herein designated VGAM GENE, is a viral gene contained in the genome of Vaccinia virus. VGAM263 host target gene, herein designated VGAM HOST TARGET GENE, is a human gene contained in the human genome.

[3638] VGAM263 gene, herein designated VGAM GENE, encodes a VGAM263 precursor RNA, herein designated VGAM PRECURSOR RNA. Similar to other miRNA genes, and unlike most ordinary genes, VGAM263 precursor RNA, herein designated VGAM PRECURSOR RNA, does not encode a protein. A nucleotide sequence identical or highly similar to the nucleotide sequence of VGAM263 precursor RNA is designated SEQ ID:249, and is provided hereinbelow with reference to the sequence listing part. Nucleotide sequence SEQ ID:249 is located at position 147919 relative to the genome of Vaccinia virus.

[3639] VGAM263 precursor RNA, herein designated VGAM PRECURSOR RNA, folds onto itself, forming VGAM263 folded precursor RNA, herein designated VGAM FOLDED PRECURSOR RNA, which has a two-dimensional hairpin structure. As is well known in the art, this hairpin structure, is typical of RNA encoded by miRNA genes, and is due to the fact that the nucleotide sequence of the first half of the RNA encoded by a miRNA gene is an accurate or partial inversed-reversed sequence of the nucleotide sequence of the second half thereof.

[3640] An enzyme complex designated DICER COMPLEX, dices the VGAM263 folded precursor RNA, herein designated VGAM FOLDED PRECURSOR RNA, into VGAM263 RNA, herein designated VGAM RNA, a single stranded ˜22 nt long RNA segment. As is known in the art, dicing of a hairpin structured RNA precursor product into a short ˜22 nt RNA segment is catalyzed by an enzyme complex comprising an enzyme called Dicer together with other necessary proteins. A probable (over 80%) nucleotide sequence of VGAM263 RNA is designated SEQ ID:598, and is provided hereinbelow with reference to the sequence listing part.

[3641] VGAM263 host target gene, herein designated VGAM HOST TARGET GENE, encodes a corresponding messenger RNA, VGAM263 host target RNA, herein designated VGAM HOST TARGET RNA. VGAM263 host target RNA, herein designated VGAM HOST TARGET RNA, comprises three regions, as is typical of mRNA of a protein coding gene: a 5 untranslated region, a protein coding region and a 3 untranslated region, designated 5UTR, PROTEIN CODING and 3UTR respectively.

[3642] VGAM263 RNA, herein designated VGAM RNA, binds complementarily to one or more host target binding sites located in untranslated regions of VGAM263 host target RNA, herein designated VGAM HOST TARGET RNA. This complementary binding is due to the fact that the nucleotide sequence of VGAM263 RNA, herein designated VGAM RNA, is an accurate or a partial inversed-reversed sequence of the nucleotide sequence of each of the host target binding sites. As an illustration, FIG. 1 shows 3 such host target binding sites, designated BINDING SITE I, BINDING SITE II and BINDING SITE III respectively. It is appreciated that the number of host target binding sites shown in FIG. 1 is meant as an illustration only, and is not meant to be limiting VGAM263 RNA, herein designated VGAM RNA, may have a different number of host target binding sites in untranslated regions of a VGAM263 host target RNA, herein designated VGAM HOST TARGET RNA. It is further appreciated that while FIG. 1 depicts host target binding sites in the 3UTR region, this is meant as an example only these host target binding sites may be located in the 3UTR region, the 5UTR region, or in both 3UTR and 5UTR regions.

[3643] The complementary binding of VGAM263 RNA, herein designated VGAM RNA, to host target binding sites on VGAM263 host target RNA, herein designated VGAM HOST TARGET RNA, such as BINDING SITE I, BINDING SITE II and BINDING SITE III, inhibits translation of VGAM263 host target RNA, herein designated VGAM HOST TARGET RNA, into VGAM263 host target protein, herein designated VGAM HOST TARGET PROTEIN. VGAM host target protein is therefore outlined by a broken line.

[3644] It is appreciated that VGAM263 host target gene, herein designated VGAM HOST TARGET GENE, in fact represents a plurality of VGAM263 host target genes. The mRNA of each one of this plurality of VGAM263 host target genes comprises one or more host target binding sites, each having a nucleotide sequence which is at least partly complementary to VGAM263 RNA, herein designated VGAM RNA, and which when bound by VGAM263 RNA, herein designated VGAM RNA, causes inhibition of translation of respective one or more VGAM263 host target proteins.

[3645] It is further appreciated by one skilled in the art that the mode of translational inhibition illustrated by FIG. 1 with specific reference to translational inhibition exerted by VGAM263 gene, herein designated VGAM GENE, on one or more VGAM263 host target gene, herein designated VGAM HOST TARGET GENE, is in fact common to other known non-viral miRNA genes. As mentioned hereinabove with reference to the background section, although a specific complementary binding site has been demonstrated only for some of the known miRNA genes (primarily Lin-4 and Let-7), all other recently discovered miRNA genes are also believed by those skilled in the art to modulate expression of other genes by complementary binding, although specific complementary binding sites of these other miRNA genes have not yet been found (Ruvkun G., Perspective: Glimpses of a tiny RNA world, Science 294, 779 (2001)).

[3646] It is yet further appreciated that a function of VGAM263 is inhibition of expression of host target genes, as part of a novel viral mechanism of attacking a host. Accordingly, utilities of VGAM263 include diagnosis, prevention and treatment of viral infection by Vaccinia virus. Specific functions, and accordingly utilities, of VGAM263 correlate with, and may be deduced from, the identity of the host target genes which VGAM263 binds and inhibits, and the function of these host target genes, as elaborated hereinbelow.

[3647] Nucleotide sequences of the VGAM263 precursor RNA, herein designated VGAM PRECURSOR RNA, and of the diced VGAM263 RNA, herein designated VGAM RNA, and a schematic representation of the secondary folding of VGAM263 folded precursor RNA, herein designated VGAM FOLDED PRECURSOR RNA, of VGAM263 are further described hereinbelow with reference to Table 1.

[3648] Nucleotide sequences of host target binding sites, such as BINDING SITE-I, BINDING SITE-II and BINDING SITE-III of FIG. 1, found on, and schematic representation of the complementarity of each of these host target binding sites to VGAM263 RNA, herein designated VGAM RNA, are described hereinbelow with reference to Table 2.

[3649] FIG. 1 further provides a conceptual description of another novel bioinformatically detected viral gene of the present invention, referred to here as Viral Genomic Address Messenger 264 (VGAM264) viral gene, which modulates expression of respective host target genes thereof, the function and utility of which host target genes is known in the art.

[3650] VGAM264 is a novel bioinformatically detected regulatory, non protein coding, viral micro RNA (miRNA) gene. The method by which VGAM264 was detected is described hereinabove with reference to FIGS. 2-8.

[3651] VGAM264 gene, herein designated VGAM GENE, is a viral gene contained in the genome of Vaccinia virus. VGAM264 host target gene, herein designated VGAM HOST TARGET GENE, is a human gene contained in the human genome.

[3652] VGAM264 gene, herein designated VGAM GENE, encodes a VGAM264 precursor RNA, herein designated VGAM PRECURSOR RNA. Similar to other miRNA genes, and unlike most ordinary genes, VGAM264 precursor RNA, herein designated VGAM PRECURSOR RNA, does not encode a protein. A nucleotide sequence identical or highly similar to the nucleotide sequence of VGAM264 precursor RNA is designated SEQ ID:250, and is provided hereinbelow with reference to the sequence listing part. Nucleotide sequence SEQ ID:250 is located at position 148297 relative to the genome of Vaccinia virus.

[3653] VGAM264 precursor RNA, herein designated VGAM PRECURSOR RNA, folds onto itself, forming VGAM264 folded precursor RNA, herein designated VGAM FOLDED PRECURSOR RNA, which has a two-dimensional hairpin structure. As is well known in the art, this hairpin structure, is typical of RNA encoded by miRNA genes, and is due to the fact that the nucleotide sequence of the first half of the RNA encoded by a miRNA gene is an accurate or partial inversed-reversed sequence of the nucleotide sequence of the second half thereof.

[3654] An enzyme complex designated DICER COMPLEX, dices the VGAM264 folded precursor RNA, herein designated VGAM FOLDED PRECURSOR RNA, into VGAM264 RNA, herein designated VGAM RNA, a single stranded ˜22 nt long RNA segment. As is known in the art, dicing of a hairpin structured RNA precursor product into a short ˜22 nt RNA segment is catalyzed by an enzyme complex comprising an enzyme called Dicer together with other necessary proteins. A probable (over 87%) nucleotide sequence of VGAM264 RNA is designated SEQ ID:599, and is provided hereinbelow with reference to the sequence listing part.

[3655] VGAM264 host target gene, herein designated VGAM HOST TARGET GENE, encodes a corresponding messenger RNA, VGAM264 host target RNA, herein designated VGAM HOST TARGET RNA. VGAM264 host target RNA, herein designated VGAM HOST TARGET RNA, comprises three regions, as is typical of mRNA of a protein coding gene: a 5 untranslated region, a protein coding region and a 3 untranslated region, designated 5UTR, PROTEIN CODING and 3UTR respectively.

[3656] VGAM264 RNA, herein designated VGAM RNA, binds complementarily to one or more host target binding sites located in untranslated regions of VGAM264 host target RNA, herein designated VGAM HOST TARGET RNA. This complementary binding is due to the fact that the nucleotide sequence of VGAM264 RNA, herein designated VGAM RNA, is an accurate or a partial inversed-reversed sequence of the nucleotide sequence of each of the host target binding sites. As an illustration, FIG. 1 shows 3 such host target binding sites, designated BINDING SITE I, BINDING SITE II and BINDING SITE III respectively. It is appreciated that the number of host target binding sites shown in FIG. 1 is meant as an illustration only, and is not meant to be limiting VGAM264 RNA, herein designated VGAM RNA, may have a different number of host target binding sites in untranslated regions of a VGAM264 host target RNA, herein designated VGAM HOST TARGET RNA. It is further appreciated that while FIG. 1 depicts host target binding sites in the 3UTR region, this is meant as an example only these host target binding sites may be located in the 3UTR region, the 5UTR region, or in both 3UTR and 5UTR regions.

[3657] The complementary binding of VGAM264 RNA, herein designated VGAM RNA, to host target binding sites on VGAM264 host target RNA, herein designated VGAM HOST TARGET RNA, such as BINDING SITE I, BINDING SITE II and BINDING SITE III, inhibits translation of VGAM264 host target RNA, herein designated VGAM HOST TARGET RNA, into VGAM264 host target protein, herein designated VGAM HOST TARGET PROTEIN. VGAM host target protein is therefore outlined by a broken line.

[3658] It is appreciated that VGAM264 host target gene, herein designated VGAM HOST TARGET GENE, in fact represents a plurality of VGAM264 host target genes. The mRNA of each one of this plurality of VGAM264 host target genes comprises one or more host target binding sites, each having a nucleotide sequence which is at least partly complementary to VGAM264 RNA, herein designated VGAM RNA, and which when bound by VGAM264 RNA, herein designated VGAM RNA, causes inhibition of translation of respective one or more VGAM264 host target proteins.

[3659] It is further appreciated by one skilled in the art that the mode of translational inhibition illustrated by FIG. 1 with specific reference to translational inhibition exerted by VGAM264 gene, herein designated VGAM GENE, on one or more VGAM264 host target gene, herein designated VGAM HOST TARGET GENE, is in fact common to other known non-viral miRNA genes. As mentioned hereinabove with reference to the background section, although a specific complementary binding site has been demonstrated only for some of the known miRNA genes (primarily Lin-4 and Let-7), all other recently discovered miRNA genes are also believed by those skilled in the art to modulate expression of other genes by complementary binding, although specific complementary binding sites of these other miRNA genes have not yet been found (Ruvkun G., Perspective: Glimpses of a tiny RNA world, Science 294, 779 (2001)).

[3660] It is yet further appreciated that a function of VGAM264 is inhibition of expression of host target genes, as part of a novel viral mechanism of attacking a host. Accordingly, utilities of VGAM264 include diagnosis, prevention and treatment of viral infection by Vaccinia virus. Specific functions, and accordingly utilities, of VGAM264 correlate with, and may be deduced from, the identity of the host target genes which VGAM264 binds and inhibits, and the function of these host target genes, as elaborated hereinbelow.

[3661] Nucleotide sequences of the VGAM264 precursor RNA, herein designated VGAM PRECURSOR RNA, and of the diced VGAM264 RNA, herein designated VGAM RNA, and a schematic representation of the secondary folding of VGAM264 folded precursor RNA, herein designated VGAM FOLDED PRECURSOR RNA, of VGAM264 are further described hereinbelow with reference to Table 1.

[3662] Nucleotide sequences of host target binding sites, such as BINDING SITE-I, BINDING SITE-II and BINDING SITE-III of FIG. 1, found on, and schematic representation of the complementarity of each of these host target binding sites to VGAM264 RNA, herein designated VGAM RNA, are described hereinbelow with reference to Table 2.

[3663] FIG. 1 further provides a conceptual description of another novel bioinformatically detected viral gene of the present invention, referred to here as Viral Genomic Address Messenger 265 (VGAM265) viral gene, which modulates expression of respective host target genes thereof, the function and utility of which host target genes is known in the art.

[3664] VGAM265 is a novel bioinformatically detected regulatory, non protein coding, viral micro RNA (miRNA) gene. The method by which VGAM265 was detected is described hereinabove with reference to FIGS. 2-8.

[3665] VGAM265 gene, herein designated VGAM GENE, is a viral gene contained in the genome of Vaccinia virus. VGAM265 host target gene, herein designated VGAM HOST TARGET GENE, is a human gene contained in the human genome.

[3666] VGAM265 gene, herein designated VGAM GENE, encodes a VGAM265 precursor RNA, herein designated VGAM PRECURSOR RNA. Similar to other miRNA genes, and unlike most ordinary genes, VGAM265 precursor RNA, herein designated VGAM PRECURSOR RNA, does not encode a protein. A nucleotide sequence identical or highly similar to the nucleotide sequence of VGAM265 precursor RNA is designated SEQ ID:251, and is provided hereinbelow with reference to the sequence listing part. Nucleotide sequence SEQ ID:251 is located at position 148003 relative to the genome of Vaccinia virus.

[3667] VGAM265 precursor RNA, herein designated VGAM PRECURSOR RNA, folds onto itself, forming VGAM265 folded precursor RNA, herein designated VGAM FOLDED PRECURSOR RNA, which has a two-dimensional hairpin structure. As is well known in the art, this hairpin structure, is typical of RNA encoded by miRNA genes, and is due to the fact that the nucleotide sequence of the first half of the RNA encoded by a miRNA gene is an accurate or partial inversed-reversed sequence of the nucleotide sequence of the second half thereof.

[3668] An enzyme complex designated DICER COMPLEX, dices the VGAM265 folded precursor RNA, herein designated VGAM FOLDED PRECURSOR RNA, into VGAM265 RNA, herein designated VGAM RNA, a single stranded ˜22 nt long RNA segment. As is known in the art, dicing of a hairpin structured RNA precursor product into a short ˜22 nt RNA segment is catalyzed by an enzyme complex comprising an enzyme called Dicer together with other necessary proteins. A probable (over 86%) nucleotide sequence of VGAM265 RNA is designated SEQ ID:600, and is provided hereinbelow with reference to the sequence listing part.

[3669] VGAM265 host target gene, herein designated VGAM HOST TARGET GENE, encodes a corresponding messenger RNA, VGAM265 host target RNA, herein designated VGAM HOST TARGET RNA. VGAM265 host target RNA, herein designated VGAM HOST TARGET RNA, comprises three regions, as is typical of mRNA of a protein coding gene: a 5 untranslated region, a protein coding region and a 3 untranslated region, designated 5UTR, PROTEIN CODING and 3UTR respectively.

[3670] VGAM265 RNA, herein designated VGAM RNA, binds complementarily to one or more host target binding sites located in untranslated regions of VGAM265 host target RNA, herein designated VGAM HOST TARGET RNA. This complementary binding is due to the fact that the nucleotide sequence of VGAM265 RNA, herein designated VGAM RNA, is an accurate or a partial inversed-reversed sequence of the nucleotide sequence of each of the host target binding sites. As an illustration, FIG. 1 shows 3 such host target binding sites, designated BINDING SITE I, BINDING SITE II and BINDING SITE III respectively. It is appreciated that the number of host target binding sites shown in FIG. 1 is meant as an illustration only, and is not meant to be limiting VGAM265 RNA, herein designated VGAM RNA, may have a different number of host target binding sites in untranslated regions of a VGAM265 host target RNA, herein designated VGAM HOST TARGET RNA. It is further appreciated that while FIG. 1 depicts host target binding sites in the 3UTR region, this is meant as an example only these host target binding sites may be located in the 3UTR region, the 5UTR region, or in both 3UTR and 5UTR regions.

[3671] The complementary binding of VGAM265 RNA, herein designated VGAM RNA, to host target binding sites on VGAM265 host target RNA, herein designated VGAM HOST TARGET RNA, such as BINDING SITE I, BINDING SITE II and BINDING SITE III, inhibits translation of VGAM265 host target RNA, herein designated VGAM HOST TARGET RNA, into VGAM265 host target protein, herein designated VGAM HOST TARGET PROTEIN. VGAM host target protein is therefore outlined by a broken line.

[3672] It is appreciated that VGAM265 host target gene, herein designated VGAM HOST TARGET GENE, in fact represents a plurality of VGAM265 host target genes. The mRNA of each one of this plurality of VGAM265 host target genes comprises one or more host target binding sites, each having a nucleotide sequence which is at least partly complementary to VGAM265 RNA, herein designated VGAM RNA, and which when bound by VGAM265 RNA, herein designated VGAM RNA, causes inhibition of translation of respective one or more VGAM265 host target proteins.

[3673] It is further appreciated by one skilled in the art that the mode of translational inhibition illustrated by FIG. 1 with specific reference to translational inhibition exerted by VGAM265 gene, herein designated VGAM GENE, on one or more VGAM265 host target gene, herein designated VGAM HOST TARGET GENE, is in fact common to other known non-viral miRNA genes. As mentioned hereinabove with reference to the background section, although a specific complementary binding site has been demonstrated only for some of the known miRNA genes (primarily Lin-4 and Let-7), all other recently discovered miRNA genes are also believed by those skilled in the art to modulate expression of other genes by complementary binding, although specific complementary binding sites of these other miRNA genes have not yet been found (Ruvkun G., Perspective: Glimpses of a tiny RNA world, Science 294, 779 (2001)).

[3674] It is yet further appreciated that a function of VGAM265 is inhibition of expression of host target genes, as part of a novel viral mechanism of attacking a host. Accordingly, utilities of VGAM265 include diagnosis, prevention and treatment of viral infection by Vaccinia virus. Specific functions, and accordingly utilities, of VGAM265 correlate with, and may be deduced from, the identity of the host target genes which VGAM265 binds and inhibits, and the function of these host target genes, as elaborated hereinbelow.

[3675] Nucleotide sequences of the VGAM265 precursor RNA, herein designated VGAM PRECURSOR RNA, and of the diced VGAM265 RNA, herein designated VGAM RNA, and a schematic representation of the secondary folding of VGAM265 folded precursor RNA, herein designated VGAM FOLDED PRECURSOR RNA, of VGAM265 are further described hereinbelow with reference to Table 1.

[3676] Nucleotide sequences of host target binding sites, such as BINDING SITE-I, BINDING SITE-II and BINDING SITE-III of FIG. 1, found on, and schematic representation of the complementarity of each of these host target binding sites to VGAM265 RNA, herein designated VGAM RNA, are described hereinbelow with reference to Table 2.

[3677] FIG. 1 further provides a conceptual description of another novel bioinformatically detected viral gene of the present invention, referred to here as Viral Genomic Address Messenger 266 (VGAM266) viral gene, which modulates expression of respective host target genes thereof, the function and utility of which host target genes is known in the art.

[3678] VGAM266 is a novel bioinformatically detected regulatory, non protein coding, viral micro RNA (miRNA) gene. The method by which VGAM266 was detected is described hereinabove with reference to FIGS. 2-8.

[3679] VGAM266 gene, herein designated VGAM GENE, is a viral gene contained in the genome of Vaccinia virus. VGAM266 host target gene, herein designated VGAM HOST TARGET GENE, is a human gene contained in the human genome.

[3680] VGAM266 gene, herein designated VGAM GENE, encodes a VGAM266 precursor RNA, herein designated VGAM PRECURSOR RNA. Similar to other miRNA genes, and unlike most ordinary genes, VGAM266 precursor RNA, herein designated VGAM PRECURSOR RNA, does not encode a protein. A nucleotide sequence identical or highly similar to the nucleotide sequence of VGAM266 precursor RNA is designated SEQ ID:252, and is provided hereinbelow with reference to the sequence listing part. Nucleotide sequence SEQ ID:252 is located at position 149215 relative to the genome of Vaccinia virus.

[3681] VGAM266 precursor RNA, herein designated VGAM PRECURSOR RNA, folds onto itself, forming VGAM266 folded precursor RNA, herein designated VGAM FOLDED PRECURSOR RNA, which has a two-dimensional hairpin structure. As is well known in the art, this hairpin structure, is typical of RNA encoded by miRNA genes, and is due to the fact that the nucleotide sequence of the first half of the RNA encoded by a miRNA gene is an accurate or partial inversed-reversed sequence of the nucleotide sequence of the second half thereof.

[3682] An enzyme complex designated DICER COMPLEX, dices the VGAM266 folded precursor RNA, herein designated VGAM FOLDED PRECURSOR RNA, into VGAM266 RNA, herein designated VGAM RNA, a single stranded ˜22 nt long RNA segment. As is known in the art, dicing of a hairpin structured RNA precursor product into a short ˜22 nt RNA segment is catalyzed by an enzyme complex comprising an enzyme called Dicer together with other necessary proteins. A probable (over 86%) nucleotide sequence of VGAM266 RNA is designated SEQ ID:601, and is provided hereinbelow with reference to the sequence listing part.

[3683] VGAM266 host target gene, herein designated VGAM HOST TARGET GENE, encodes a corresponding messenger RNA, VGAM266 host target RNA, herein designated VGAM HOST TARGET RNA. VGAM266 host target RNA, herein designated VGAM HOST TARGET RNA, comprises three regions, as is typical of mRNA of a protein coding gene: a 5 untranslated region, a protein coding region and a 3 untranslated region, designated 5UTR, PROTEIN CODING and 3UTR respectively.

[3684] VGAM266 RNA, herein designated VGAM RNA, binds complementarily to one or more host target binding sites located in untranslated regions of VGAM266 host target RNA, herein designated VGAM HOST TARGET RNA. This complementary binding is due to the fact that the nucleotide sequence of VGAM266 RNA, herein designated VGAM RNA, is an accurate or a partial inversed-reversed sequence of the nucleotide sequence of each of the host target binding sites. As an illustration, FIG. 1 shows 3 such host target binding sites, designated BINDING SITE I, BINDING SITE II and BINDING SITE III respectively. It is appreciated that the number of host target binding sites shown in FIG. 1 is meant as an illustration only, and is not meant to be limiting VGAM266 RNA, herein designated VGAM RNA, may have a different number of host target binding sites in untranslated regions of a VGAM266 host target RNA, herein designated VGAM HOST TARGET RNA. It is further appreciated that while FIG. 1 depicts host target binding sites in the 3UTR region, this is meant as an example only these host target binding sites may be located in the 3UTR region, the 5UTR region, or in both 3UTR and 5UTR regions.

[3685] The complementary binding of VGAM266 RNA, herein designated VGAM RNA, to host target binding sites on VGAM266 host target RNA, herein designated VGAM HOST TARGET RNA, such as BINDING SITE I, BINDING SITE II and BINDING SITE III, inhibits translation of VGAM266 host target RNA, herein designated VGAM HOST TARGET RNA, into VGAM266 host target protein, herein designated VGAM HOST TARGET PROTEIN. VGAM host target protein is therefore outlined by a broken line.

[3686] It is appreciated that VGAM266 host target gene, herein designated VGAM HOST TARGET GENE, in fact represents a plurality of VGAM266 host target genes. The mRNA of each one of this plurality of VGAM266 host target genes comprises one or more host target binding sites, each having a nucleotide sequence which is at least partly complementary to VGAM266 RNA, herein designated VGAM RNA, and which when bound by VGAM266 RNA, herein designated VGAM RNA, causes inhibition of translation of respective one or more VGAM266 host target proteins.

[3687] It is further appreciated by one skilled in the art that the mode of translational inhibition illustrated by FIG. 1 with specific reference to translational inhibition exerted by VGAM266 gene, herein designated VGAM GENE, on one or more VGAM266 host target gene, herein designated VGAM HOST TARGET GENE, is in fact common to other known non-viral miRNA genes. As mentioned hereinabove with reference to the background section, although a specific complementary binding site has been demonstrated only for some of the known miRNA genes (primarily Lin-4 and Let-7), all other recently discovered miRNA genes are also believed by those skilled in the art to modulate expression of other genes by complementary binding, although specific complementary binding sites of these other miRNA genes have not yet been found (Ruvkun G., Perspective: Glimpses of a tiny RNA world, Science 294, 779 (2001)).

[3688] It is yet further appreciated that a function of VGAM266 is inhibition of expression of host target genes, as part of a novel viral mechanism of attacking a host. Accordingly, utilities of VGAM266 include diagnosis, prevention and treatment of viral infection by Vaccinia virus. Specific functions, and accordingly utilities, of VGAM266 correlate with, and may be deduced from, the identity of the host target genes which VGAM266 binds and inhibits, and the function of these host target genes, as elaborated hereinbelow.

[3689] Nucleotide sequences of the VGAM266 precursor RNA, herein designated VGAM PRECURSOR RNA, and of the diced VGAM266 RNA, herein designated VGAM RNA, and a schematic representation of the secondary folding of VGAM266 folded precursor RNA, herein designated VGAM FOLDED PRECURSOR RNA, of VGAM266 are further described hereinbelow with reference to Table 1.

[3690] Nucleotide sequences of host target binding sites, such as BINDING SITE-I, BINDING SITE-II and BINDING SITE-III of FIG. 1, found on, and schematic representation of the complementarity of each of these host target binding sites to VGAM266 RNA, herein designated VGAM RNA, are described hereinbelow with reference to Table 2.

[3691] FIG. 1 further provides a conceptual description of another novel bioinformatically detected viral gene of the present invention, referred to here as Viral Genomic Address Messenger 267 (VGAM267) viral gene, which modulates expression of respective host target genes thereof, the function and utility of which host target genes is known in the art.

[3692] VGAM267 is a novel bioinformatically detected regulatory, non protein coding, viral micro RNA (miRNA) gene. The method by which VGAM267 was detected is described hereinabove with reference to FIGS. 2-8.

[3693] VGAM267 gene, herein designated VGAM GENE, is a viral gene contained in the genome of Vaccinia virus. VGAM267 host target gene, herein designated VGAM HOST TARGET GENE, is a human gene contained in the human genome.

[3694] VGAM267 gene, herein designated VGAM GENE, encodes a VGAM267 precursor RNA, herein designated VGAM PRECURSOR RNA. Similar to other miRNA genes, and unlike most ordinary genes, VGAM267 precursor RNA, herein designated VGAM PRECURSOR RNA, does not encode a protein. A nucleotide sequence identical or highly similar to the nucleotide sequence of VGAM267 precursor RNA is designated SEQ ID:253, and is provided hereinbelow with reference to the sequence listing part. Nucleotide sequence SEQ ID:253 is located at position 148793 relative to the genome of Vaccinia virus.

[3695] VGAM267 precursor RNA, herein designated VGAM PRECURSOR RNA, folds onto itself, forming VGAM267 folded precursor RNA, herein designated VGAM FOLDED PRECURSOR RNA, which has a two-dimensional hairpin structure. As is well known in the art, this hairpin structure, is typical of RNA encoded by miRNA genes, and is due to the fact that the nucleotide sequence of the first half of the RNA encoded by a miRNA gene is an accurate or partial inversed-reversed sequence of the nucleotide sequence of the second half thereof.

[3696] An enzyme complex designated DICER COMPLEX, dices the VGAM267 folded precursor RNA, herein designated VGAM FOLDED PRECURSOR RNA, into VGAM267 RNA, herein designated VGAM RNA, a single stranded ˜22 nt long RNA segment. As is known in the art, dicing of a hairpin structured RNA precursor product into a short ˜22 nt RNA segment is catalyzed by an enzyme complex comprising an enzyme called Dicer together with other necessary proteins. A probable (over 91%) nucleotide sequence of VGAM267 RNA is designated SEQ ID:602, and is provided hereinbelow with reference to the sequence listing part.

[3697] VGAM267 host target gene, herein designated VGAM HOST TARGET GENE, encodes a corresponding messenger RNA, VGAM267 host target RNA, herein designated VGAM HOST TARGET RNA. VGAM267 host target RNA, herein designated VGAM HOST TARGET RNA, comprises three regions, as is typical of mRNA of a protein coding gene: a 5 untranslated region, a protein coding region and a 3 untranslated region, designated 5UTR, PROTEIN CODING and 3UTR respectively.

[3698] VGAM267 RNA, herein designated VGAM RNA, binds complementarily to one or more host target binding sites located in untranslated regions of VGAM267 host target RNA, herein designated VGAM HOST TARGET RNA. This complementary binding is due to the fact that the nucleotide sequence of VGAM267 RNA, herein designated VGAM RNA, is an accurate or a partial inversed-reversed sequence of the nucleotide sequence of each of the host target binding sites. As an illustration, FIG. 1 shows 3 such host target binding sites, designated BINDING SITE I, BINDING SITE II and BINDING SITE III respectively. It is appreciated that the number of host target binding sites shown in FIG. 1 is meant as an illustration only, and is not meant to be limiting VGAM267 RNA, herein designated VGAM RNA, may have a different number of host target binding sites in untranslated regions of a VGAM267 host target RNA, herein designated VGAM HOST TARGET RNA. It is further appreciated that while FIG. 1 depicts host target binding sites in the 3UTR region, this is meant as an example only these host target binding sites may be located in the 3UTR region, the 5UTR region, or in both 3UTR and 5UTR regions.

[3699] The complementary binding of VGAM267 RNA, herein designated VGAM RNA, to host target binding sites on VGAM267 host target RNA, herein designated VGAM HOST TARGET RNA, such as BINDING SITE I, BINDING SITE II and BINDING SITE III, inhibits translation of VGAM267 host target RNA, herein designated VGAM HOST TARGET RNA, into VGAM267 host target protein, herein designated VGAM HOST TARGET PROTEIN. VGAM host target protein is therefore outlined by a broken line.

[3700] It is appreciated that VGAM267 host target gene, herein designated VGAM HOST TARGET GENE, in fact represents a plurality of VGAM267 host target genes. The mRNA of each one of this plurality of VGAM267 host target genes comprises one or more host target binding sites, each having a nucleotide sequence which is at least partly complementary to VGAM267 RNA, herein designated VGAM RNA, and which when bound by VGAM267 RNA, herein designated VGAM RNA, causes inhibition of translation of respective one or more VGAM267 host target proteins.

[3701] It is further appreciated by one skilled in the art that the mode of translational inhibition illustrated by FIG. 1 with specific reference to translational inhibition exerted by VGAM267 gene, herein designated VGAM GENE, on one or more VGAM267 host target gene, herein designated VGAM HOST TARGET GENE, is in fact common to other known non-viral miRNA genes. As mentioned hereinabove with reference to the background section, although a specific complementary binding site has been demonstrated only for some of the known miRNA genes (primarily Lin-4 and Let-7), all other recently discovered miRNA genes are also believed by those skilled in the art to modulate expression of other genes by complementary binding, although specific complementary binding sites of these other miRNA genes have not yet been found (Ruvkun G., Perspective: Glimpses of a tiny RNA world, Science 294, 779 (2001)).

[3702] It is yet further appreciated that a function of VGAM267 is inhibition of expression of host target genes, as part of a novel viral mechanism of attacking a host. Accordingly, utilities of VGAM267 include diagnosis, prevention and treatment of viral infection by Vaccinia virus. Specific functions, and accordingly utilities, of VGAM267 correlate with, and may be deduced from, the identity of the host target genes which VGAM267 binds and inhibits, and the function of these host target genes, as elaborated hereinbelow.

[3703] Nucleotide sequences of the VGAM267 precursor RNA, herein designated VGAM PRECURSOR RNA, and of the diced VGAM267 RNA, herein designated VGAM RNA, and a schematic representation of the secondary folding of VGAM267 folded precursor RNA, herein designated VGAM FOLDED PRECURSOR RNA, of VGAM267 are further described hereinbelow with reference to Table 1.

[3704] Nucleotide sequences of host target binding sites, such as BINDING SITE-I, BINDING SITE-II and BINDING SITE-III of FIG. 1, found on, and schematic representation of the complementarity of each of these host target binding sites to VGAM267 RNA, herein designated VGAM RNA, are described hereinbelow with reference to Table 2.

[3705] FIG. 1 further provides a conceptual description of another novel bioinformatically detected viral gene of the present invention, referred to here as Viral Genomic Address Messenger 268 (VGAM268) viral gene, which modulates expression of respective host target genes thereof, the function and utility of which host target genes is known in the art.

[3706] VGAM268 is a novel bioinformatically detected regulatory, non protein coding, viral micro RNA (miRNA) gene. The method by which VGAM268 was detected is described hereinabove with reference to FIGS. 2-8.

[3707] VGAM268 gene, herein designated VGAM GENE, is a viral gene contained in the genome of Vaccinia virus. VGAM268 host target gene, herein designated VGAM HOST TARGET GENE, is a human gene contained in the human genome.

[3708] VGAM268 gene, herein designated VGAM GENE, encodes a VGAM268 precursor RNA, herein designated VGAM PRECURSOR RNA. Similar to other miRNA genes, and unlike most ordinary genes, VGAM268 precursor RNA, herein designated VGAM PRECURSOR RNA, does not encode a protein. A nucleotide sequence identical or highly similar to the nucleotide sequence of VGAM268 precursor RNA is designated SEQ ID:254, and is provided hereinbelow with reference to the sequence listing part. Nucleotide sequence SEQ ID:254 is located at position 153199 relative to the genome of Vaccinia virus.

[3709] VGAM268 precursor RNA, herein designated VGAM PRECURSOR RNA, folds onto itself, forming VGAM268 folded precursor RNA, herein designated VGAM FOLDED PRECURSOR RNA, which has a two-dimensional hairpin structure. As is well known in the art, this hairpin structure, is typical of RNA encoded by miRNA genes, and is due to the fact that the nucleotide sequence of the first half of the RNA encoded by a miRNA gene is an accurate or partial inversed-reversed sequence of the nucleotide sequence of the second half thereof.

[3710] An enzyme complex designated DICER COMPLEX, dices the VGAM268 folded precursor RNA, herein designated VGAM FOLDED PRECURSOR RNA, into VGAM268 RNA, herein designated VGAM RNA, a single stranded ˜22 nt long RNA segment. As is known in the art, dicing of a hairpin structured RNA precursor product into a short ˜22 nt RNA segment is catalyzed by an enzyme complex comprising an enzyme called Dicer together with other necessary proteins. A probable (over 78%) nucleotide sequence of VGAM268 RNA is designated SEQ ID:603, and is provided hereinbelow with reference to the sequence listing part.

[3711] VGAM268 host target gene, herein designated VGAM HOST TARGET GENE, encodes a corresponding messenger RNA, VGAM268 host target RNA, herein designated VGAM HOST TARGET RNA. VGAM268 host target RNA, herein designated VGAM HOST TARGET RNA, comprises three regions, as is typical of mRNA of a protein coding gene: a 5 untranslated region, a protein coding region and a 3 untranslated region, designated 5UTR, PROTEIN CODING and 3UTR respectively.

[3712] VGAM268 RNA, herein designated VGAM RNA, binds complementarily to one or more host target binding sites located in untranslated regions of VGAM268 host target RNA, herein designated VGAM HOST TARGET RNA. This complementary binding is due to the fact that the nucleotide sequence of VGAM268 RNA, herein designated VGAM RNA, is an accurate or a partial inversed-reversed sequence of the nucleotide sequence of each of the host target binding sites. As an illustration, FIG. 1 shows 3 such host target binding sites, designated BINDING SITE I, BINDING SITE II and BINDING SITE III respectively. It is appreciated that the number of host target binding sites shown in FIG. 1 is meant as an illustration only, and is not meant to be limiting VGAM268 RNA, herein designated VGAM RNA, may have a different number of host target binding sites in untranslated regions of a VGAM268 host target RNA, herein designated VGAM HOST TARGET RNA. It is further appreciated that while FIG. 1 depicts host target binding sites in the 3UTR region, this is meant as an example only these host target binding sites may be located in the 3UTR region, the 5UTR region, or in both 3UTR and 5UTR regions.

[3713] The complementary binding of VGAM268 RNA, herein designated VGAM RNA, to host target binding sites on VGAM268 host target RNA, herein designated VGAM HOST TARGET RNA, such as BINDING SITE I, BINDING SITE II and BINDING SITE III, inhibits translation of VGAM268 host target RNA, herein designated VGAM HOST TARGET RNA, into VGAM268 host target protein, herein designated VGAM HOST TARGET PROTEIN. VGAM host target protein is therefore outlined by a broken line.

[3714] It is appreciated that VGAM268 host target gene, herein designated VGAM HOST TARGET GENE, in fact represents a plurality of VGAM268 host target genes. The mRNA of each one of this plurality of VGAM268 host target genes comprises one or more host target binding sites, each having a nucleotide sequence which is at least partly complementary to VGAM268 RNA, herein designated VGAM RNA, and which when bound by VGAM268 RNA, herein designated VGAM RNA, causes inhibition of translation of respective one or more VGAM268 host target proteins.

[3715] It is further appreciated by one skilled in the art that the mode of translational inhibition illustrated by FIG. 1 with specific reference to translational inhibition exerted by VGAM268 gene, herein designated VGAM GENE, on one or more VGAM268 host target gene, herein designated VGAM HOST TARGET GENE, is in fact common to other known non-viral miRNA genes. As mentioned hereinabove with reference to the background section, although a specific complementary binding site has been demonstrated only for some of the known miRNA genes (primarily Lin-4 and Let-7), all other recently discovered miRNA genes are also believed by those skilled in the art to modulate expression of other genes by complementary binding, although specific complementary binding sites of these other miRNA genes have not yet been found (Ruvkun G., Perspective: Glimpses of a tiny RNA world, Science 294, 779 (2001)).

[3716] It is yet further appreciated that a function of VGAM268 is inhibition of expression of host target genes, as part of a novel viral mechanism of attacking a host. Accordingly, utilities of VGAM268 include diagnosis, prevention and treatment of viral infection by Vaccinia virus. Specific functions, and accordingly utilities, of VGAM268 correlate with, and may be deduced from, the identity of the host target genes which VGAM268 binds and inhibits, and the function of these host target genes, as elaborated hereinbelow.

[3717] Nucleotide sequences of the VGAM268 precursor RNA, herein designated VGAM PRECURSOR RNA, and of the diced VGAM268 RNA, herein designated VGAM RNA, and a schematic representation of the secondary folding of VGAM268 folded precursor RNA, herein designated VGAM FOLDED PRECURSOR RNA, of VGAM268 are further described hereinbelow with reference to Table 1.

[3718] Nucleotide sequences of host target binding sites, such as BINDING SITE-I, BINDING SITE-II and BINDING SITE-III of FIG. 1, found on, and schematic representation of the complementarity of each of these host target binding sites to VGAM268 RNA, herein designated VGAM RNA, are described hereinbelow with reference to Table 2.

[3719] FIG. 1 further provides a conceptual description of another novel bioinformatically detected viral gene of the present invention, referred to here as Viral Genomic Address Messenger 269 (VGAM269) viral gene, which modulates expression of respective host target genes thereof, the function and utility of which host target genes is known in the art.

[3720] VGAM269 is a novel bioinformatically detected regulatory, non protein coding, viral micro RNA (miRNA) gene. The method by which VGAM269 was detected is described hereinabove with reference to FIGS. 2-8.

[3721] VGAM269 gene, herein designated VGAM GENE, is a viral gene contained in the genome of Vaccinia virus. VGAM269 host target gene, herein designated VGAM HOST TARGET GENE, is a human gene contained in the human genome.

[3722] VGAM269 gene, herein designated VGAM GENE, encodes a VGAM269 precursor RNA, herein designated VGAM PRECURSOR RNA. Similar to other miRNA genes, and unlike most ordinary genes, VGAM269 precursor RNA, herein designated VGAM PRECURSOR RNA, does not encode a protein. A nucleotide sequence identical or highly similar to the nucleotide sequence of VGAM269 precursor RNA is designated SEQ ID:255, and is provided hereinbelow with reference to the sequence listing part. Nucleotide sequence SEQ ID:255 is located at position 153361 relative to the genome of Vaccinia virus.

[3723] VGAM269 precursor RNA, herein designated VGAM PRECURSOR RNA, folds onto itself, forming VGAM269 folded precursor RNA, herein designated VGAM FOLDED PRECURSOR RNA, which has a two-dimensional hairpin structure. As is well known in the art, this hairpin structure, is typical of RNA encoded by miRNA genes, and is due to the fact that the nucleotide sequence of the first half of the RNA encoded by a miRNA gene is an accurate or partial inversed-reversed sequence of the nucleotide sequence of the second half thereof.

[3724] An enzyme complex designated DICER COMPLEX, dices the VGAM269 folded precursor RNA, herein designated VGAM FOLDED PRECURSOR RNA, into VGAM269 RNA, herein designated VGAM RNA, a single stranded ˜22 nt long RNA segment. As is known in the art, dicing of a hairpin structured RNA precursor product into a short ˜22 nt RNA segment is catalyzed by an enzyme complex comprising an enzyme called Dicer together with other necessary proteins. A probable (over 86%) nucleotide sequence of VGAM269 RNA is designated SEQ ID:604, and is provided hereinbelow with reference to the sequence listing part.

[3725] VGAM269 host target gene, herein designated VGAM HOST TARGET GENE, encodes a corresponding messenger RNA, VGAM269 host target RNA, herein designated VGAM HOST TARGET RNA. VGAM269 host target RNA, herein designated VGAM HOST TARGET RNA, comprises three regions, as is typical of mRNA of a protein coding gene: a 5 untranslated region, a protein coding region and a 3 untranslated region, designated 5UTR, PROTEIN CODING and 3UTR respectively.

[3726] VGAM269 RNA, herein designated VGAM RNA, binds complementarily to one or more host target binding sites located in untranslated regions of VGAM269 host target RNA, herein designated VGAM HOST TARGET RNA. This complementary binding is due to the fact that the nucleotide sequence of VGAM269 RNA, herein designated VGAM RNA, is an accurate or a partial inversed-reversed sequence of the nucleotide sequence of each of the host target binding sites. As an illustration, FIG. 1 shows 3 such host target binding sites, designated BINDING SITE I, BINDING SITE II and BINDING SITE III respectively. It is appreciated that the number of host target binding sites shown in FIG. 1 is meant as an illustration only, and is not meant to be limiting VGAM269 RNA, herein designated VGAM RNA, may have a different number of host target binding sites in untranslated regions of a VGAM269 host target RNA, herein designated VGAM HOST TARGET RNA. It is further appreciated that while FIG. 1 depicts host target binding sites in the 3UTR region, this is meant as an example only these host target binding sites may be located in the 3UTR region, the 5UTR region, or in both 3UTR and 5UTR regions.

[3727] The complementary binding of VGAM269 RNA, herein designated VGAM RNA, to host target binding sites on VGAM269 host target RNA, herein designated VGAM HOST TARGET RNA, such as BINDING SITE I, BINDING SITE II and BINDING SITE III, inhibits translation of VGAM269 host target RNA, herein designated VGAM HOST TARGET RNA, into VGAM269 host target protein, herein designated VGAM HOST TARGET PROTEIN. VGAM host target protein is therefore outlined by a broken line.

[3728] It is appreciated that VGAM269 host target gene, herein designated VGAM HOST TARGET GENE, in fact represents a plurality of VGAM269 host target genes. The mRNA of each one of this plurality of VGAM269 host target genes comprises one or more host target binding sites, each having a nucleotide sequence which is at least partly complementary to VGAM269 RNA, herein designated VGAM RNA, and which when bound by VGAM269 RNA, herein designated VGAM RNA, causes inhibition of translation of respective one or more VGAM269 host target proteins.

[3729] It is further appreciated by one skilled in the art that the mode of translational inhibition illustrated by FIG. 1 with specific reference to translational inhibition exerted by VGAM269 gene, herein designated VGAM GENE, on one or more VGAM269 host target gene, herein designated VGAM HOST TARGET GENE, is in fact common to other known non-viral miRNA genes. As mentioned hereinabove with reference to the background section, although a specific complementary binding site has been demonstrated only for some of the known miRNA genes (primarily Lin-4 and Let-7), all other recently discovered miRNA genes are also believed by those skilled in the art to modulate expression of other genes by complementary binding, although specific complementary binding sites of these other miRNA genes have not yet been found (Ruvkun G., Perspective: Glimpses of a tiny RNA world, Science 294, 779 (2001)).

[3730] It is yet further appreciated that a function of VGAM269 is inhibition of expression of host target genes, as part of a novel viral mechanism of attacking a host. Accordingly, utilities of VGAM269 include diagnosis, prevention and treatment of viral infection by Vaccinia virus. Specific functions, and accordingly utilities, of VGAM269 correlate with, and may be deduced from, the identity of the host target genes which VGAM269 binds and inhibits, and the function of these host target genes, as elaborated hereinbelow.

[3731] Nucleotide sequences of the VGAM269 precursor RNA, herein designated VGAM PRECURSOR RNA, and of the diced VGAM269 RNA, herein designated VGAM RNA, and a schematic representation of the secondary folding of VGAM269 folded precursor RNA, herein designated VGAM FOLDED PRECURSOR RNA, of VGAM269 are further described hereinbelow with reference to Table 1.

[3732] Nucleotide sequences of host target binding sites, such as BINDING SITE-I, BINDING SITE-II and BINDING SITE-III of FIG. 1, found on, and schematic representation of the complementarity of each of these host target binding sites to VGAM269 RNA, herein designated VGAM RNA, are described hereinbelow with reference to Table 2.

[3733] FIG. 1 further provides a conceptual description of another novel bioinformatically detected viral gene of the present invention, referred to here as Viral Genomic Address Messenger 270 (VGAM270) viral gene, which modulates expression of respective host target genes thereof, the function and utility of which host target genes is known in the art.

[3734] VGAM270 is a novel bioinformatically detected regulatory, non protein coding, viral micro RNA (miRNA) gene. The method by which VGAM270 was detected is described hereinabove with reference to FIGS. 2-8.

[3735] VGAM270 gene, herein designated VGAM GENE, is a viral gene contained in the genome of Vaccinia virus. VGAM270 host target gene, herein designated VGAM HOST TARGET GENE, is a human gene contained in the human genome.

[3736] VGAM270 gene, herein designated VGAM GENE, encodes a VGAM270 precursor RNA, herein designated VGAM PRECURSOR RNA. Similar to other miRNA genes, and unlike most ordinary genes, VGAM270 precursor RNA, herein designated VGAM PRECURSOR RNA, does not encode a protein. A nucleotide sequence identical or highly similar to the nucleotide sequence of VGAM270 precursor RNA is designated SEQ ID:256, and is provided hereinbelow with reference to the sequence listing part. Nucleotide sequence SEQ ID:256 is located at position 153717 relative to the genome of Vaccinia virus.

[3737] VGAM270 precursor RNA, herein designated VGAM PRECURSOR RNA, folds onto itself, forming VGAM270 folded precursor RNA, herein designated VGAM FOLDED PRECURSOR RNA, which has a two-dimensional hairpin structure. As is well known in the art, this hairpin structure, is typical of RNA encoded by miRNA genes, and is due to the fact that the nucleotide sequence of the first half of the RNA encoded by a miRNA gene is an accurate or partial inversed-reversed sequence of the nucleotide sequence of the second half thereof.

[3738] An enzyme complex designated DICER COMPLEX, dices the VGAM270 folded precursor RNA, herein designated VGAM FOLDED PRECURSOR RNA, into VGAM270 RNA, herein designated VGAM RNA, a single stranded ˜22 nt long RNA segment. As is known in the art, dicing of a hairpin structured RNA precursor product into a short ˜22 nt RNA segment is catalyzed by an enzyme complex comprising an enzyme called Dicer together with other necessary proteins. A probable (over 83%) nucleotide sequence of VGAM270 RNA is designated SEQ ID:605, and is provided hereinbelow with reference to the sequence listing part.

[3739] VGAM270 host target gene, herein designated VGAM HOST TARGET GENE, encodes a corresponding messenger RNA, VGAM270 host target RNA, herein designated VGAM HOST TARGET RNA. VGAM270 host target RNA, herein designated VGAM HOST TARGET RNA, comprises three regions, as is typical of mRNA of a protein coding gene: a 5 untranslated region, a protein coding region and a 3 untranslated region, designated 5UTR, PROTEIN CODING and 3UTR respectively.

[3740] VGAM270 RNA, herein designated VGAM RNA, binds complementarily to one or more host target binding sites located in untranslated regions of VGAM270 host target RNA, herein designated VGAM HOST TARGET RNA. This complementary binding is due to the fact that the nucleotide sequence of VGAM270 RNA, herein designated VGAM RNA, is an accurate or a partial inversed-reversed sequence of the nucleotide sequence of each of the host target binding sites. As an illustration, FIG. 1 shows 3 such host target binding sites, designated BINDING SITE I, BINDING SITE II and BINDING SITE III respectively. It is appreciated that the number of host target binding sites shown in FIG. 1 is meant as an illustration only, and is not meant to be limiting VGAM270 RNA, herein designated VGAM RNA, may have a different number of host target binding sites in untranslated regions of a VGAM270 host target RNA, herein designated VGAM HOST TARGET RNA. It is further appreciated that while FIG. 1 depicts host target binding sites in the 3UTR region, this is meant as an example only these host target binding sites may be located in the 3UTR region, the 5UTR region, or in both 3UTR and 5UTR regions.

[3741] The complementary binding of VGAM270 RNA, herein designated VGAM RNA, to host target binding sites on VGAM270 host target RNA, herein designated VGAM HOST TARGET RNA, such as BINDING SITE I, BINDING SITE II and BINDING SITE III, inhibits translation of VGAM270 host target RNA, herein designated VGAM HOST TARGET RNA, into VGAM270 host target protein, herein designated VGAM HOST TARGET PROTEIN. VGAM host target protein is therefore outlined by a broken line.

[3742] It is appreciated that VGAM270 host target gene, herein designated VGAM HOST TARGET GENE, in fact represents a plurality of VGAM270 host target genes. The mRNA of each one of this plurality of VGAM270 host target genes comprises one or more host target binding sites, each having a nucleotide sequence which is at least partly complementary to VGAM270 RNA, herein designated VGAM RNA, and which when bound by VGAM270 RNA, herein designated VGAM RNA, causes inhibition of translation of respective one or more VGAM270 host target proteins.

[3743] It is further appreciated by one skilled in the art that the mode of translational inhibition illustrated by FIG. 1 with specific reference to translational inhibition exerted by VGAM270 gene, herein designated VGAM GENE, on one or more VGAM270 host target gene, herein designated VGAM HOST TARGET GENE, is in fact common to other known non-viral miRNA genes. As mentioned hereinabove with reference to the background section, although a specific complementary binding site has been demonstrated only for some of the known miRNA genes (primarily Lin-4 and Let-7), all other recently discovered miRNA genes are also believed by those skilled in the art to modulate expression of other genes by complementary binding, although specific complementary binding sites of these other miRNA genes have not yet been found (Ruvkun G., Perspective: Glimpses of a tiny RNA world, Science 294, 779 (2001)).

[3744] It is yet further appreciated that a function of VGAM270 is inhibition of expression of host target genes, as part of a novel viral mechanism of attacking a host. Accordingly, utilities of VGAM270 include diagnosis, prevention and treatment of viral infection by Vaccinia virus. Specific functions, and accordingly utilities, of VGAM270 correlate with, and may be deduced from, the identity of the host target genes which VGAM270 binds and inhibits, and the function of these host target genes, as elaborated hereinbelow.

[3745] Nucleotide sequences of the VGAM270 precursor RNA, herein designated VGAM PRECURSOR RNA, and of the diced VGAM270 RNA, herein designated VGAM RNA, and a schematic representation of the secondary folding of VGAM270 folded precursor RNA, herein designated VGAM FOLDED PRECURSOR RNA, of VGAM270 are further described hereinbelow with reference to Table 1.

[3746] Nucleotide sequences of host target binding sites, such as BINDING SITE-I, BINDING SITE-II and BINDING SITE-III of FIG. 1, found on, and schematic representation of the complementarity of each of these host target binding sites to VGAM270 RNA, herein designated VGAM RNA, are described hereinbelow with reference to Table 2.

[3747] FIG. 1 further provides a conceptual description of another novel bioinformatically detected viral gene of the present invention, referred to here as Viral Genomic Address Messenger 271 (VGAM271) viral gene, which modulates expression of respective host target genes thereof, the function and utility of which host target genes is known in the art.

[3748] VGAM271 is a novel bioinformatically detected regulatory, non protein coding, viral micro RNA (miRNA) gene. The method by which VGAM271 was detected is described hereinabove with reference to FIGS. 2-8.

[3749] VGAM271 gene, herein designated VGAM GENE, is a viral gene contained in the genome of Vaccinia virus. VGAM271 host target gene, herein designated VGAM HOST TARGET GENE, is a human gene contained in the human genome.

[3750] VGAM271 gene, herein designated VGAM GENE, encodes a VGAM271 precursor RNA, herein designated VGAM PRECURSOR RNA. Similar to other miRNA genes, and unlike most ordinary genes, VGAM271 precursor RNA, herein designated VGAM PRECURSOR RNA, does not encode a protein. A nucleotide sequence identical or highly similar to the nucleotide sequence of VGAM271 precursor RNA is designated SEQ ID:257, and is provided hereinbelow with reference to the sequence listing part. Nucleotide sequence SEQ ID:257 is located at position 152876 relative to the genome of Vaccinia virus.

[3751] VGAM271 precursor RNA, herein designated VGAM PRECURSOR RNA, folds onto itself, forming VGAM271 folded precursor RNA, herein designated VGAM FOLDED PRECURSOR RNA, which has a two-dimensional hairpin structure. As is well known in the art, this hairpin structure, is typical of RNA encoded by miRNA genes, and is due to the fact that the nucleotide sequence of the first half of the RNA encoded by a miRNA gene is an accurate or partial inversed-reversed sequence of the nucleotide sequence of the second half thereof.

[3752] An enzyme complex designated DICER COMPLEX, dices the VGAM271 folded precursor RNA, herein designated VGAM FOLDED PRECURSOR RNA, into VGAM271 RNA, herein designated VGAM RNA, a single stranded ˜22 nt long RNA segment. As is known in the art, dicing of a hairpin structured RNA precursor product into a short ˜22 nt RNA segment is catalyzed by an enzyme complex comprising an enzyme called Dicer together with other necessary proteins. A probable (over 72%) nucleotide sequence of VGAM271 RNA is designated SEQ ID:606, and is provided hereinbelow with reference to the sequence listing part.

[3753] VGAM271 host target gene, herein designated VGAM HOST TARGET GENE, encodes a corresponding messenger RNA, VGAM271 host target RNA, herein designated VGAM HOST TARGET RNA. VGAM271 host target RNA, herein designated VGAM HOST TARGET RNA, comprises three regions, as is typical of mRNA of a protein coding gene: a 5 untranslated region, a protein coding region and a 3 untranslated region, designated 5UTR, PROTEIN CODING and 3UTR respectively.

[3754] VGAM271 RNA, herein designated VGAM RNA, binds complementarily to one or more host target binding sites located in untranslated regions of VGAM271 host target RNA, herein designated VGAM HOST TARGET RNA. This complementary binding is due to the fact that the nucleotide sequence of VGAM271 RNA, herein designated VGAM RNA, is an accurate or a partial inversed-reversed sequence of the nucleotide sequence of each of the host target binding sites. As an illustration, FIG. 1 shows 3 such host target binding sites, designated BINDING SITE I, BINDING SITE II and BINDING SITE III respectively. It is appreciated that the number of host target binding sites shown in FIG. 1 is meant as an illustration only, and is not meant to be limiting VGAM271 RNA, herein designated VGAM RNA, may have a different number of host target binding sites in untranslated regions of a VGAM271 host target RNA, herein designated VGAM HOST TARGET RNA. It is further appreciated that while FIG. 1 depicts host target binding sites in the 3UTR region, this is meant as an example only these host target binding sites may be located in the 3UTR region, the 5UTR region, or in both 3UTR and 5UTR regions.

[3755] The complementary binding of VGAM271 RNA, herein designated VGAM RNA, to host target binding sites on VGAM271 host target RNA, herein designated VGAM HOST TARGET RNA, such as BINDING SITE I, BINDING SITE II and BINDING SITE III, inhibits translation of VGAM271 host target RNA, herein designated VGAM HOST TARGET RNA, into VGAM271 host target protein, herein designated VGAM HOST TARGET PROTEIN. VGAM host target protein is therefore outlined by a broken line.

[3756] It is appreciated that VGAM271 host target gene, herein designated VGAM HOST TARGET GENE, in fact represents a plurality of VGAM271 host target genes. The mRNA of each one of this plurality of VGAM271 host target genes comprises one or more host target binding sites, each having a nucleotide sequence which is at least partly complementary to VGAM271 RNA, herein designated VGAM RNA, and which when bound by VGAM271 RNA, herein designated VGAM RNA, causes inhibition of translation of respective one or more VGAM271 host target proteins.

[3757] It is further appreciated by one skilled in the art that the mode of translational inhibition illustrated by FIG. 1 with specific reference to translational inhibition exerted by VGAM271 gene, herein designated VGAM GENE, on one or more VGAM271 host target gene, herein designated VGAM HOST TARGET GENE, is in fact common to other known non-viral miRNA genes. As mentioned hereinabove with reference to the background section, although a specific complementary binding site has been demonstrated only for some of the known miRNA genes (primarily Lin-4 and Let-7), all other recently discovered miRNA genes are also believed by those skilled in the art to modulate expression of other genes by complementary binding, although specific complementary binding sites of these other miRNA genes have not yet been found (Ruvkun G., Perspective: Glimpses of a tiny RNA world, Science 294, 779 (2001)).

[3758] It is yet further appreciated that a function of VGAM271 is inhibition of expression of host target genes, as part of a novel viral mechanism of attacking a host. Accordingly, utilities of VGAM271 include diagnosis, prevention and treatment of viral infection by Vaccinia virus. Specific functions, and accordingly utilities, of VGAM271 correlate with, and may be deduced from, the identity of the host target genes which VGAM271 binds and inhibits, and the function of these host target genes, as elaborated hereinbelow.

[3759] Nucleotide sequences of the VGAM271 precursor RNA, herein designated VGAM PRECURSOR RNA, and of the diced VGAM271 RNA, herein designated VGAM RNA, and a schematic representation of the secondary folding of VGAM271 folded precursor RNA, herein designated VGAM FOLDED PRECURSOR RNA, of VGAM271 are further described hereinbelow with reference to Table 1.

[3760] Nucleotide sequences of host target binding sites, such as BINDING SITE-I, BINDING SITE-II and BINDING SITE-III of FIG. 1, found on, and schematic representation of the complementarity of each of these host target binding sites to VGAM271 RNA, herein designated VGAM RNA, are described hereinbelow with reference to Table 2.

[3761] FIG. 1 further provides a conceptual description of another novel bioinformatically detected viral gene of the present invention, referred to here as Viral Genomic Address Messenger 272 (VGAM272) viral gene, which modulates expression of respective host target genes thereof, the function and utility of which host target genes is known in the art.

[3762] VGAM272 is a novel bioinformatically detected regulatory, non protein coding, viral micro RNA (miRNA) gene. The method by which VGAM272 was detected is described hereinabove with reference to FIGS. 2-8.

[3763] VGAM272 gene, herein designated VGAM GENE, is a viral gene contained in the genome of Vaccinia virus. VGAM272 host target gene, herein designated VGAM HOST TARGET GENE, is a human gene contained in the human genome.

[3764] VGAM272 gene, herein designated VGAM GENE, encodes a VGAM272 precursor RNA, herein designated VGAM PRECURSOR RNA. Similar to other miRNA genes, and unlike most ordinary genes, VGAM272 precursor RNA, herein designated VGAM PRECURSOR RNA, does not encode a protein. A nucleotide sequence identical or highly similar to the nucleotide sequence of VGAM272 precursor RNA is designated SEQ ID:258, and is provided hereinbelow with reference to the sequence listing part. Nucleotide sequence SEQ ID:258 is located at position 154919 relative to the genome of Vaccinia virus.

[3765] VGAM272 precursor RNA, herein designated VGAM PRECURSOR RNA, folds onto itself, forming VGAM272 folded precursor RNA, herein designated VGAM FOLDED PRECURSOR RNA, which has a two-dimensional hairpin structure. As is well known in the art, this hairpin structure, is typical of RNA encoded by miRNA genes, and is due to the fact that the nucleotide sequence of the first half of the RNA encoded by a miRNA gene is an accurate or partial inversed-reversed sequence of the nucleotide sequence of the second half thereof.

[3766] An enzyme complex designated DICER COMPLEX, dices the VGAM272 folded precursor RNA, herein designated VGAM FOLDED PRECURSOR RNA, into VGAM272 RNA, herein designated VGAM RNA, a single stranded ˜22 nt long RNA segment. As is known in the art, dicing of a hairpin structured RNA precursor product into a short ˜22 nt RNA segment is catalyzed by an enzyme complex comprising an enzyme called Dicer together with other necessary proteins. A probable (over 72%) nucleotide sequence of VGAM272 RNA is designated SEQ ID:607, and is provided hereinbelow with reference to the sequence listing part.

[3767] VGAM272 host target gene, herein designated VGAM HOST TARGET GENE, encodes a corresponding messenger RNA, VGAM272 host target RNA, herein designated VGAM HOST TARGET RNA. VGAM272 host target RNA, herein designated VGAM HOST TARGET RNA, comprises three regions, as is typical of mRNA of a protein coding gene: a 5 untranslated region, a protein coding region and a 3 untranslated region, designated 5UTR, PROTEIN CODING and 3UTR respectively.

[3768] VGAM272 RNA, herein designated VGAM RNA, binds complementarily to one or more host target binding sites located in untranslated regions of VGAM272 host target RNA, herein designated VGAM HOST TARGET RNA. This complementary binding is due to the fact that the nucleotide sequence of VGAM272 RNA, herein designated VGAM RNA, is an accurate or a partial inversed-reversed sequence of the nucleotide sequence of each of the host target binding sites. As an illustration, FIG. 1 shows 3 such host target binding sites, designated BINDING SITE I, BINDING SITE II and BINDING SITE III respectively. It is appreciated that the number of host target binding sites shown in FIG. 1 is meant as an illustration only, and is not meant to be limiting VGAM272 RNA, herein designated VGAM RNA, may have a different number of host target binding sites in untranslated regions of a VGAM272 host target RNA, herein designated VGAM HOST TARGET RNA. It is further appreciated that while FIG. 1 depicts host target binding sites in the 3UTR region, this is meant as an example only these host target binding sites may be located in the 3UTR region, the 5UTR region, or in both 3UTR and 5UTR regions.

[3769] The complementary binding of VGAM272 RNA, herein designated VGAM RNA, to host target binding sites on VGAM272 host target RNA, herein designated VGAM HOST TARGET RNA, such as BINDING SITE I, BINDING SITE II and BINDING SITE III, inhibits translation of VGAM272 host target RNA, herein designated VGAM HOST TARGET RNA, into VGAM272 host target protein, herein designated VGAM HOST TARGET PROTEIN. VGAM host target protein is therefore outlined by a broken line.

[3770] It is appreciated that VGAM272 host target gene, herein designated VGAM HOST TARGET GENE, in fact represents a plurality of VGAM272 host target genes. The mRNA of each one of this plurality of VGAM272 host target genes comprises one or more host target binding sites, each having a nucleotide sequence which is at least partly complementary to VGAM272 RNA, herein designated VGAM RNA, and which when bound by VGAM272 RNA, herein designated VGAM RNA, causes inhibition of translation of respective one or more VGAM272 host target proteins.

[3771] It is further appreciated by one skilled in the art that the mode of translational inhibition illustrated by FIG. 1 with specific reference to translational inhibition exerted by VGAM272 gene, herein designated VGAM GENE, on one or more VGAM272 host target gene, herein designated VGAM HOST TARGET GENE, is in fact common to other known non-viral miRNA genes. As mentioned hereinabove with reference to the background section, although a specific complementary binding site has been demonstrated only for some of the known miRNA genes (primarily Lin-4 and Let-7), all other recently discovered miRNA genes are also believed by those skilled in the art to modulate expression of other genes by complementary binding, although specific complementary binding sites of these other miRNA genes have not yet been found (Ruvkun G., Perspective: Glimpses of a tiny RNA world, Science 294, 779 (2001)).

[3772] It is yet further appreciated that a function of VGAM272 is inhibition of expression of host target genes, as part of a novel viral mechanism of attacking a host. Accordingly, utilities of VGAM272 include diagnosis, prevention and treatment of viral infection by Vaccinia virus. Specific functions, and accordingly utilities, of VGAM272 correlate with, and may be deduced from, the identity of the host target genes which VGAM272 binds and inhibits, and the function of these host target genes, as elaborated hereinbelow.

[3773] Nucleotide sequences of the VGAM272 precursor RNA, herein designated VGAM PRECURSOR RNA, and of the diced VGAM272 RNA, herein designated VGAM RNA, and a schematic representation of the secondary folding of VGAM272 folded precursor RNA, herein designated VGAM FOLDED PRECURSOR RNA, of VGAM272 are further described hereinbelow with reference to Table 1.

[3774] Nucleotide sequences of host target binding sites, such as BINDING SITE-I, BINDING SITE-II and BINDING SITE-III of FIG. 1, found on, and schematic representation of the complementarity of each of these host target binding sites to VGAM272 RNA, herein designated VGAM RNA, are described hereinbelow with reference to Table 2.

[3775] FIG. 1 further provides a conceptual description of another novel bioinformatically detected viral gene of the present invention, referred to here as Viral Genomic Address Messenger 273 (VGAM273) viral gene, which modulates expression of respective host target genes thereof, the function and utility of which host target genes is known in the art.

[3776] VGAM273 is a novel bioinformatically detected regulatory, non protein coding, viral micro RNA (miRNA) gene. The method by which VGAM273 was detected is described hereinabove with reference to FIGS. 2-8.

[3777] VGAM273 gene, herein designated VGAM GENE, is a viral gene contained in the genome of Vaccinia virus. VGAM273 host target gene, herein designated VGAM HOST TARGET GENE, is a human gene contained in the human genome.

[3778] VGAM273 gene, herein designated VGAM GENE, encodes a VGAM273 precursor RNA, herein designated VGAM PRECURSOR RNA. Similar to other miRNA genes, and unlike most ordinary genes, VGAM273 precursor RNA, herein designated VGAM PRECURSOR RNA, does not encode a protein. A nucleotide sequence identical or highly similar to the nucleotide sequence of VGAM273 precursor RNA is designated SEQ ID:259, and is provided hereinbelow with reference to the sequence listing part. Nucleotide sequence SEQ ID:259 is located at position 154466 relative to the genome of Vaccinia virus.

[3779] VGAM273 precursor RNA, herein designated VGAM PRECURSOR RNA, folds onto itself, forming VGAM273 folded precursor RNA, herein designated VGAM FOLDED PRECURSOR RNA, which has a two-dimensional hairpin structure. As is well known in the art, this hairpin structure, is typical of RNA encoded by miRNA genes, and is due to the fact that the nucleotide sequence of the first half of the RNA encoded by a miRNA gene is an accurate or partial inversed-reversed sequence of the nucleotide sequence of the second half thereof.

[3780] An enzyme complex designated DICER COMPLEX, dices the VGAM273 folded precursor RNA, herein designated VGAM FOLDED PRECURSOR RNA, into VGAM273 RNA, herein designated VGAM RNA, a single stranded ˜22 nt long RNA segment. As is known in the art, dicing of a hairpin structured RNA precursor product into a short ˜22 nt RNA segment is catalyzed by an enzyme complex comprising an enzyme called Dicer together with other necessary proteins. A probable (over 91%) nucleotide sequence of VGAM273 RNA is designated SEQ ID:608, and is provided hereinbelow with reference to the sequence listing part.

[3781] VGAM273 host target gene, herein designated VGAM HOST TARGET GENE, encodes a corresponding messenger RNA, VGAM273 host target RNA, herein designated VGAM HOST TARGET RNA. VGAM273 host target RNA, herein designated VGAM HOST TARGET RNA, comprises three regions, as is typical of mRNA of a protein coding gene: a 5 untranslated region, a protein coding region and a 3 untranslated region, designated 5UTR, PROTEIN CODING and 3UTR respectively.

[3782] VGAM273 RNA, herein designated VGAM RNA, binds complementarily to one or more host target binding sites located in untranslated regions of VGAM273 host target RNA, herein designated VGAM HOST TARGET RNA. This complementary binding is due to the fact that the nucleotide sequence of VGAM273 RNA, herein designated VGAM RNA, is an accurate or a partial inversed-reversed sequence of the nucleotide sequence of each of the host target binding sites. As an illustration, FIG. 1 shows 3 such host target binding sites, designated BINDING SITE I, BINDING SITE II and BINDING SITE III respectively. It is appreciated that the number of host target binding sites shown in FIG. 1 is meant as an illustration only, and is not meant to be limiting VGAM273 RNA, herein designated VGAM RNA, may have a different number of host target binding sites in untranslated regions of a VGAM273 host target RNA, herein designated VGAM HOST TARGET RNA. It is further appreciated that while FIG. 1 depicts host target binding sites in the 3UTR region, this is meant as an example only these host target binding sites may be located in the 3UTR region, the 5UTR region, or in both 3UTR and 5UTR regions.

[3783] The complementary binding of VGAM273 RNA, herein designated VGAM RNA, to host target binding sites on VGAM273 host target RNA, herein designated VGAM HOST TARGET RNA, such as BINDING SITE I, BINDING SITE II and BINDING SITE III, inhibits translation of VGAM273 host target RNA, herein designated VGAM HOST TARGET RNA, into VGAM273 host target protein, herein designated VGAM HOST TARGET PROTEIN. VGAM host target protein is therefore outlined by a broken line.

[3784] It is appreciated that VGAM273 host target gene, herein designated VGAM HOST TARGET GENE, in fact represents a plurality of VGAM273 host target genes. The mRNA of each one of this plurality of VGAM273 host target genes comprises one or more host target binding sites, each having a nucleotide sequence which is at least partly complementary to VGAM273 RNA, herein designated VGAM RNA, and which when bound by VGAM273 RNA, herein designated VGAM RNA, causes inhibition of translation of respective one or more VGAM273 host target proteins.

[3785] It is further appreciated by one skilled in the art that the mode of translational inhibition illustrated by FIG. 1 with specific reference to translational inhibition exerted by VGAM273 gene, herein designated VGAM GENE, on one or more VGAM273 host target gene, herein designated VGAM HOST TARGET GENE, is in fact common to other known non-viral miRNA genes. As mentioned hereinabove with reference to the background section, although a specific complementary binding site has been demonstrated only for some of the known miRNA genes (primarily Lin-4 and Let-7), all other recently discovered miRNA genes are also believed by those skilled in the art to modulate expression of other genes by complementary binding, although specific complementary binding sites of these other miRNA genes have not yet been found (Ruvkun G., Perspective: Glimpses of a tiny RNA world, Science 294, 779 (2001)).

[3786] It is yet further appreciated that a function of VGAM273 is inhibition of expression of host target genes, as part of a novel viral mechanism of attacking a host. Accordingly, utilities of VGAM273 include diagnosis, prevention and treatment of viral infection by Vaccinia virus. Specific functions, and accordingly utilities, of VGAM273 correlate with, and may be deduced from, the identity of the host target genes which VGAM273 binds and inhibits, and the function of these host target genes, as elaborated hereinbelow.

[3787] Nucleotide sequences of the VGAM273 precursor RNA, herein designated VGAM PRECURSOR RNA, and of the diced VGAM273 RNA, herein designated VGAM RNA, and a schematic representation of the secondary folding of VGAM273 folded precursor RNA, herein designated VGAM FOLDED PRECURSOR RNA, of VGAM273 are further described hereinbelow with reference to Table 1.

[3788] Nucleotide sequences of host target binding sites, such as BINDING SITE-I, BINDING SITE-II and BINDING SITE-III of FIG. 1, found on, and schematic representation of the complementarity of each of these host target binding sites to VGAM273 RNA, herein designated VGAM RNA, are described hereinbelow with reference to Table 2.

[3789] FIG. 1 further provides a conceptual description of another novel bioinformatically detected viral gene of the present invention, referred to here as Viral Genomic Address Messenger 274 (VGAM274) viral gene, which modulates expression of respective host target genes thereof, the function and utility of which host target genes is known in the art.

[3790] VGAM274 is a novel bioinformatically detected regulatory, non protein coding, viral micro RNA (miRNA) gene. The method by which VGAM274 was detected is described hereinabove with reference to FIGS. 2-8.

[3791] VGAM274 gene, herein designated VGAM GENE, is a viral gene contained in the genome of Vaccinia virus. VGAM274 host target gene, herein designated VGAM HOST TARGET GENE, is a human gene contained in the human genome.

[3792] VGAM274 gene, herein designated VGAM GENE, encodes a VGAM274 precursor RNA, herein designated VGAM PRECURSOR RNA. Similar to other miRNA genes, and unlike most ordinary genes, VGAM274 precursor RNA, herein designated VGAM PRECURSOR RNA, does not encode a protein. A nucleotide sequence identical or highly similar to the nucleotide sequence of VGAM274 precursor RNA is designated SEQ ID:260, and is provided hereinbelow with reference to the sequence listing part. Nucleotide sequence SEQ ID:260 is located at position 156944 relative to the genome of Vaccinia virus.

[3793] VGAM274 precursor RNA, herein designated VGAM PRECURSOR RNA, folds onto itself, forming VGAM274 folded precursor RNA, herein designated VGAM FOLDED PRECURSOR RNA, which has a two-dimensional hairpin structure. As is well known in the art, this hairpin structure, is typical of RNA encoded by miRNA genes, and is due to the fact that the nucleotide sequence of the first half of the RNA encoded by a miRNA gene is an accurate or partial inversed-reversed sequence of the nucleotide sequence of the second half thereof.

[3794] An enzyme complex designated DICER COMPLEX, dices the VGAM274 folded precursor RNA, herein designated VGAM FOLDED PRECURSOR RNA, into VGAM274 RNA, herein designated VGAM RNA, a single stranded ˜22 nt long RNA segment. As is known in the art, dicing of a hairpin structured RNA precursor product into a short ˜22 nt RNA segment is catalyzed by an enzyme complex comprising an enzyme called Dicer together with other necessary proteins. A probable (over 76%) nucleotide sequence of VGAM274 RNA is designated SEQ ID:609, and is provided hereinbelow with reference to the sequence listing part.

[3795] VGAM274 host target gene, herein designated VGAM HOST TARGET GENE, encodes a corresponding messenger RNA, VGAM274 host target RNA, herein designated VGAM HOST TARGET RNA. VGAM274 host target RNA, herein designated VGAM HOST TARGET RNA, comprises three regions, as is typical of mRNA of a protein coding gene: a 5 untranslated region, a protein coding region and a 3 untranslated region, designated 5UTR, PROTEIN CODING and 3UTR respectively.

[3796] VGAM274 RNA, herein designated VGAM RNA, binds complementarily to one or more host target binding sites located in untranslated regions of VGAM274 host target RNA, herein designated VGAM HOST TARGET RNA. This complementary binding is due to the fact that the nucleotide sequence of VGAM274 RNA, herein designated VGAM RNA, is an accurate or a partial inversed-reversed sequence of the nucleotide sequence of each of the host target binding sites. As an illustration, FIG. 1 shows 3 such host target binding sites, designated BINDING SITE I, BINDING SITE II and BINDING SITE III respectively. It is appreciated that the number of host target binding sites shown in FIG. 1 is meant as an illustration only, and is not meant to be limiting VGAM274 RNA, herein designated VGAM RNA, may have a different number of host target binding sites in untranslated regions of a VGAM274 host target RNA, herein designated VGAM HOST TARGET RNA. It is further appreciated that while FIG. 1 depicts host target binding sites in the 3UTR region, this is meant as an example only these host target binding sites may be located in the 3UTR region, the 5UTR region, or in both 3UTR and 5UTR regions.

[3797] The complementary binding of VGAM274 RNA, herein designated VGAM RNA, to host target binding sites on VGAM274 host target RNA, herein designated VGAM HOST TARGET RNA, such as BINDING SITE I, BINDING SITE II and BINDING SITE III, inhibits translation of VGAM274 host target RNA, herein designated VGAM HOST TARGET RNA, into VGAM274 host target protein, herein designated VGAM HOST TARGET PROTEIN. VGAM host target protein is therefore outlined by a broken line.

[3798] It is appreciated that VGAM274 host target gene, herein designated VGAM HOST TARGET GENE, in fact represents a plurality of VGAM274 host target genes. The mRNA of each one of this plurality of VGAM274 host target genes comprises one or more host target binding sites, each having a nucleotide sequence which is at least partly complementary to VGAM274 RNA, herein designated VGAM RNA, and which when bound by VGAM274 RNA, herein designated VGAM RNA, causes inhibition of translation of respective one or more VGAM274 host target proteins.

[3799] It is further appreciated by one skilled in the art that the mode of translational inhibition illustrated by FIG. 1 with specific reference to translational inhibition exerted by VGAM274 gene, herein designated VGAM GENE, on one or more VGAM274 host target gene, herein designated VGAM HOST TARGET GENE, is in fact common to other known non-viral miRNA genes. As mentioned hereinabove with reference to the background section, although a specific complementary binding site has been demonstrated only for some of the known miRNA genes (primarily Lin-4 and Let-7), all other recently discovered miRNA genes are also believed by those skilled in the art to modulate expression of other genes by complementary binding, although specific complementary binding sites of these other miRNA genes have not yet been found (Ruvkun G., Perspective: Glimpses of a tiny RNA world, Science 294, 779 (2001)).

[3800] It is yet further appreciated that a function of VGAM274 is inhibition of expression of host target genes, as part of a novel viral mechanism of attacking a host. Accordingly, utilities of VGAM274 include diagnosis, prevention and treatment of viral infection by Vaccinia virus. Specific functions, and accordingly utilities, of VGAM274 correlate with, and may be deduced from, the identity of the host target genes which VGAM274 binds and inhibits, and the function of these host target genes, as elaborated hereinbelow.

[3801] Nucleotide sequences of the VGAM274 precursor RNA, herein designated VGAM PRECURSOR RNA, and of the diced VGAM274 RNA, herein designated VGAM RNA, and a schematic representation of the secondary folding of VGAM274 folded precursor RNA, herein designated VGAM FOLDED PRECURSOR RNA, of VGAM274 are further described hereinbelow with reference to Table 1.

[3802] Nucleotide sequences of host target binding sites, such as BINDING SITE-I, BINDING SITE-II and BINDING SITE-III of FIG. 1, found on, and schematic representation of the complementarity of each of these host target binding sites to VGAM274 RNA, herein designated VGAM RNA, are described hereinbelow with reference to Table 2.

[3803] FIG. 1 further provides a conceptual description of another novel bioinformatically detected viral gene of the present invention, referred to here as Viral Genomic Address Messenger 275 (VGAM275) viral gene, which modulates expression of respective host target genes thereof, the function and utility of which host target genes is known in the art.

[3804] VGAM275 is a novel bioinformatically detected regulatory, non protein coding, viral micro RNA (miRNA) gene. The method by which VGAM275 was detected is described hereinabove with reference to FIGS. 2-8.

[3805] VGAM275 gene, herein designated VGAM GENE, is a viral gene contained in the genome of Vaccinia virus. VGAM275 host target gene, herein designated VGAM HOST TARGET GENE, is a human gene contained in the human genome.

[3806] VGAM275 gene, herein designated VGAM GENE, encodes a VGAM275 precursor RNA, herein designated VGAM PRECURSOR RNA. Similar to other miRNA genes, and unlike most ordinary genes, VGAM275 precursor RNA, herein designated VGAM PRECURSOR RNA, does not encode a protein. A nucleotide sequence identical or highly similar to the nucleotide sequence of VGAM275 precursor RNA is designated SEQ ID:261, and is provided hereinbelow with reference to the sequence listing part. Nucleotide sequence SEQ ID:261 is located at position 157919 relative to the genome of Vaccinia virus.

[3807] VGAM275 precursor RNA, herein designated VGAM PRECURSOR RNA, folds onto itself, forming VGAM275 folded precursor RNA, herein designated VGAM FOLDED PRECURSOR RNA, which has a two-dimensional hairpin structure. As is well known in the art, this hairpin structure, is typical of RNA encoded by miRNA genes, and is due to the fact that the nucleotide sequence of the first half of the RNA encoded by a miRNA gene is an accurate or partial inversed-reversed sequence of the nucleotide sequence of the second half thereof.

[3808] An enzyme complex designated DICER COMPLEX, dices the VGAM275 folded precursor RNA, herein designated VGAM FOLDED PRECURSOR RNA, into VGAM275 RNA, herein designated VGAM RNA, a single stranded ˜22 nt long RNA segment. As is known in the art, dicing of a hairpin structured RNA precursor product into a short ˜22 nt RNA segment is catalyzed by an enzyme complex comprising an enzyme called Dicer together with other necessary proteins. A probable (over 84%) nucleotide sequence of VGAM275 RNA is designated SEQ ID:610, and is provided hereinbelow with reference to the sequence listing part.

[3809] VGAM275 host target gene, herein designated VGAM HOST TARGET GENE, encodes a corresponding messenger RNA, VGAM275 host target RNA, herein designated VGAM HOST TARGET RNA. VGAM275 host target RNA, herein designated VGAM HOST TARGET RNA, comprises three regions, as is typical of mRNA of a protein coding gene: a 5 untranslated region, a protein coding region and a 3 untranslated region, designated 5UTR, PROTEIN CODING and 3UTR respectively.

[3810] VGAM275 RNA, herein designated VGAM RNA, binds complementarily to one or more host target binding sites located in untranslated regions of VGAM275 host target RNA, herein designated VGAM HOST TARGET RNA. This complementary binding is due to the fact that the nucleotide sequence of VGAM275 RNA, herein designated VGAM RNA, is an accurate or a partial inversed-reversed sequence of the nucleotide sequence of each of the host target binding sites. As an illustration, FIG. 1 shows 3 such host target binding sites, designated BINDING SITE I, BINDING SITE II and BINDING SITE III respectively. It is appreciated that the number of host target binding sites shown in FIG. 1 is meant as an illustration only, and is not meant to be limiting VGAM275 RNA, herein designated VGAM RNA, may have a different number of host target binding sites in untranslated regions of a VGAM275 host target RNA, herein designated VGAM HOST TARGET RNA. It is further appreciated that while FIG. 1 depicts host target binding sites in the 3UTR region, this is meant as an example only these host target binding sites may be located in the 3UTR region, the 5UTR region, or in both 3UTR and 5UTR regions.

[3811] The complementary binding of VGAM275 RNA, herein designated VGAM RNA, to host target binding sites on VGAM275 host target RNA, herein designated VGAM HOST TARGET RNA, such as BINDING SITE I, BINDING SITE II and BINDING SITE III, inhibits translation of VGAM275 host target RNA, herein designated VGAM HOST TARGET RNA, into VGAM275 host target protein, herein designated VGAM HOST TARGET PROTEIN. VGAM host target protein is therefore outlined by a broken line.

[3812] It is appreciated that VGAM275 host target gene, herein designated VGAM HOST TARGET GENE, in fact represents a plurality of VGAM275 host target genes. The mRNA of each one of this plurality of VGAM275 host target genes comprises one or more host target binding sites, each having a nucleotide sequence which is at least partly complementary to VGAM275 RNA, herein designated VGAM RNA, and which when bound by VGAM275 RNA, herein designated VGAM RNA, causes inhibition of translation of respective one or more VGAM275 host target proteins.

[3813] It is further appreciated by one skilled in the art that the mode of translational inhibition illustrated by FIG. 1 with specific reference to translational inhibition exerted by VGAM275 gene, herein designated VGAM GENE, on one or more VGAM275 host target gene, herein designated VGAM HOST TARGET GENE, is in fact common to other known non-viral miRNA genes. As mentioned hereinabove with reference to the background section, although a specific complementary binding site has been demonstrated only for some of the known miRNA genes (primarily Lin-4 and Let-7), all other recently discovered miRNA genes are also believed by those skilled in the art to modulate expression of other genes by complementary binding, although specific complementary binding sites of these other miRNA genes have not yet been found (Ruvkun G., Perspective: Glimpses of a tiny RNA world, Science 294, 779 (2001)).

[3814] It is yet further appreciated that a function of VGAM275 is inhibition of expression of host target genes, as part of a novel viral mechanism of attacking a host. Accordingly, utilities of VGAM275 include diagnosis, prevention and treatment of viral infection by Vaccinia virus. Specific functions, and accordingly utilities, of VGAM275 correlate with, and may be deduced from, the identity of the host target genes which VGAM275 binds and inhibits, and the function of these host target genes, as elaborated hereinbelow.

[3815] Nucleotide sequences of the VGAM275 precursor RNA, herein designated VGAM PRECURSOR RNA, and of the diced VGAM275 RNA, herein designated VGAM RNA, and a schematic representation of the secondary folding of VGAM275 folded precursor RNA, herein designated VGAM FOLDED PRECURSOR RNA, of VGAM275 are further described hereinbelow with reference to Table 1.

[3816] Nucleotide sequences of host target binding sites, such as BINDING SITE-I, BINDING SITE-II and BINDING SITE-III of FIG. 1, found on, and schematic representation of the complementarity of each of these host target binding sites to VGAM275 RNA, herein designated VGAM RNA, are described hereinbelow with reference to Table 2.

[3817] FIG. 1 further provides a conceptual description of another novel bioinformatically detected viral gene of the present invention, referred to here as Viral Genomic Address Messenger 276 (VGAM276) viral gene, which modulates expression of respective host target genes thereof, the function and utility of which host target genes is known in the art.

[3818] VGAM276 is a novel bioinformatically detected regulatory, non protein coding, viral micro RNA (miRNA) gene. The method by which VGAM276 was detected is described hereinabove with reference to FIGS. 2-8.

[3819] VGAM276 gene, herein designated VGAM GENE, is a viral gene contained in the genome of Vaccinia virus. VGAM276 host target gene, herein designated VGAM HOST TARGET GENE, is a human gene contained in the human genome.

[3820] VGAM276 gene, herein designated VGAM GENE, encodes a VGAM276 precursor RNA, herein designated VGAM PRECURSOR RNA. Similar to other miRNA genes, and unlike most ordinary genes, VGAM276 precursor RNA, herein designated VGAM PRECURSOR RNA, does not encode a protein. A nucleotide sequence identical or highly similar to the nucleotide sequence of VGAM276 precursor RNA is designated SEQ ID:262, and is provided hereinbelow with reference to the sequence listing part. Nucleotide sequence SEQ ID:262 is located at position 156818 relative to the genome of Vaccinia virus.

[3821] VGAM276 precursor RNA, herein designated VGAM PRECURSOR RNA, folds onto itself, forming VGAM276 folded precursor RNA, herein designated VGAM FOLDED PRECURSOR RNA, which has a two-dimensional hairpin structure. As is well known in the art, this hairpin structure, is typical of RNA encoded by miRNA genes, and is due to the fact that the nucleotide sequence of the first half of the RNA encoded by a miRNA gene is an accurate or partial inversed-reversed sequence of the nucleotide sequence of the second half thereof.

[3822] An enzyme complex designated DICER COMPLEX, dices the VGAM276 folded precursor RNA, herein designated VGAM FOLDED PRECURSOR RNA, into VGAM276 RNA, herein designated VGAM RNA, a single stranded ˜22 nt long RNA segment. As is known in the art, dicing of a hairpin structured RNA precursor product into a short ˜22 nt RNA segment is catalyzed by an enzyme complex comprising an enzyme called Dicer together with other necessary proteins. A probable (over 78%) nucleotide sequence of VGAM276 RNA is designated SEQ ID:611, and is provided hereinbelow with reference to the sequence listing part.

[3823] VGAM276 host target gene, herein designated VGAM HOST TARGET GENE, encodes a corresponding messenger RNA, VGAM276 host target RNA, herein designated VGAM HOST TARGET RNA. VGAM276 host target RNA, herein designated VGAM HOST TARGET RNA, comprises three regions, as is typical of mRNA of a protein coding gene: a 5 untranslated region, a protein coding region and a 3 untranslated region, designated 5UTR, PROTEIN CODING and 3UTR respectively.

[3824] VGAM276 RNA, herein designated VGAM RNA, binds complementarily to one or more host target binding sites located in untranslated regions of VGAM276 host target RNA, herein designated VGAM HOST TARGET RNA. This complementary binding is due to the fact that the nucleotide sequence of VGAM276 RNA, herein designated VGAM RNA, is an accurate or a partial inversed-reversed sequence of the nucleotide sequence of each of the host target binding sites. As an illustration, FIG. 1 shows 3 such host target binding sites, designated BINDING SITE I, BINDING SITE II and BINDING SITE III respectively. It is appreciated that the number of host target binding sites shown in FIG. 1 is meant as an illustration only, and is not meant to be limiting VGAM276 RNA, herein designated VGAM RNA, may have a different number of host target binding sites in untranslated regions of a VGAM276 host target RNA, herein designated VGAM HOST TARGET RNA. It is further appreciated that while FIG. 1 depicts host target binding sites in the 3UTR region, this is meant as an example only these host target binding sites may be located in the 3UTR region, the 5UTR region, or in both 3UTR and 5UTR regions.

[3825] The complementary binding of VGAM276 RNA, herein designated VGAM RNA, to host target binding sites on VGAM276 host target RNA, herein designated VGAM HOST TARGET RNA, such as BINDING SITE I, BINDING SITE II and BINDING SITE III, inhibits translation of VGAM276 host target RNA, herein designated VGAM HOST TARGET RNA, into VGAM276 host target protein, herein designated VGAM HOST TARGET PROTEIN. VGAM host target protein is therefore outlined by a broken line.

[3826] It is appreciated that VGAM276 host target gene, herein designated VGAM HOST TARGET GENE, in fact represents a plurality of VGAM276 host target genes. The mRNA of each one of this plurality of VGAM276 host target genes comprises one or more host target binding sites, each having a nucleotide sequence which is at least partly complementary to VGAM276 RNA, herein designated VGAM RNA, and which when bound by VGAM276 RNA, herein designated VGAM RNA, causes inhibition of translation of respective one or more VGAM276 host target proteins.

[3827] It is further appreciated by one skilled in the art that the mode of translational inhibition illustrated by FIG. 1 with specific reference to translational inhibition exerted by VGAM276 gene, herein designated VGAM GENE, on one or more VGAM276 host target gene, herein designated VGAM HOST TARGET GENE, is in fact common to other known non-viral miRNA genes. As mentioned hereinabove with reference to the background section, although a specific complementary binding site has been demonstrated only for some of the known miRNA genes (primarily Lin-4 and Let-7), all other recently discovered miRNA genes are also believed by those skilled in the art to modulate expression of other genes by complementary binding, although specific complementary binding sites of these other miRNA genes have not yet been found (Ruvkun G., Perspective: Glimpses of a tiny RNA world, Science 294, 779 (2001)).

[3828] It is yet further appreciated that a function of VGAM276 is inhibition of expression of host target genes, as part of a novel viral mechanism of attacking a host. Accordingly, utilities of VGAM276 include diagnosis, prevention and treatment of viral infection by Vaccinia virus. Specific functions, and accordingly utilities, of VGAM276 correlate with, and may be deduced from, the identity of the host target genes which VGAM276 binds and inhibits, and the function of these host target genes, as elaborated hereinbelow.

[3829] Nucleotide sequences of the VGAM276 precursor RNA, herein designated VGAM PRECURSOR RNA, and of the diced VGAM276 RNA, herein designated VGAM RNA, and a schematic representation of the secondary folding of VGAM276 folded precursor RNA, herein designated VGAM FOLDED PRECURSOR RNA, of VGAM276 are further described hereinbelow with reference to Table 1.

[3830] Nucleotide sequences of host target binding sites, such as BINDING SITE-I, BINDING SITE-II and BINDING SITE-III of FIG. 1, found on, and schematic representation of the complementarity of each of these host target binding sites to VGAM276 RNA, herein designated VGAM RNA, are described hereinbelow with reference to Table 2.

[3831] FIG. 1 further provides a conceptual description of another novel bioinformatically detected viral gene of the present invention, referred to here as Viral Genomic Address Messenger 277 (VGAM277) viral gene, which modulates expression of respective host target genes thereof, the function and utility of which host target genes is known in the art.

[3832] VGAM277 is a novel bioinformatically detected regulatory, non protein coding, viral micro RNA (miRNA) gene. The method by which VGAM277 was detected is described hereinabove with reference to FIGS. 2-8.

[3833] VGAM277 gene, herein designated VGAM GENE, is a viral gene contained in the genome of Vaccinia virus. VGAM277 host target gene, herein designated VGAM HOST TARGET GENE, is a human gene contained in the human genome.

[3834] VGAM277 gene, herein designated VGAM GENE, encodes a VGAM277 precursor RNA, herein designated VGAM PRECURSOR RNA. Similar to other miRNA genes, and unlike most ordinary genes, VGAM277 precursor RNA, herein designated VGAM PRECURSOR RNA, does not encode a protein. A nucleotide sequence identical or highly similar to the nucleotide sequence of VGAM277 precursor RNA is designated SEQ ID:263, and is provided hereinbelow with reference to the sequence listing part. Nucleotide sequence SEQ ID:263 is located at position 157748 relative to the genome of Vaccinia virus.

[3835] VGAM277 precursor RNA, herein designated VGAM PRECURSOR RNA, folds onto itself, forming VGAM277 folded precursor RNA, herein designated VGAM FOLDED PRECURSOR RNA, which has a two-dimensional hairpin structure. As is well known in the art, this hairpin structure, is typical of RNA encoded by miRNA genes, and is due to the fact that the nucleotide sequence of the first half of the RNA encoded by a miRNA gene is an accurate or partial inversed-reversed sequence of the nucleotide sequence of the second half thereof.

[3836] An enzyme complex designated DICER COMPLEX, dices the VGAM277 folded precursor RNA, herein designated VGAM FOLDED PRECURSOR RNA, into VGAM277 RNA, herein designated VGAM RNA, a single stranded ˜22 nt long RNA segment. As is known in the art, dicing of a hairpin structured RNA precursor product into a short ˜22 nt RNA segment is catalyzed by an enzyme complex comprising an enzyme called Dicer together with other necessary proteins. A probable (over 72%) nucleotide sequence of VGAM277 RNA is designated SEQ ID:612, and is provided hereinbelow with reference to the sequence listing part.

[3837] VGAM277 host target gene, herein designated VGAM HOST TARGET GENE, encodes a corresponding messenger RNA, VGAM277 host target RNA, herein designated VGAM HOST TARGET RNA. VGAM277 host target RNA, herein designated VGAM HOST TARGET RNA, comprises three regions, as is typical of mRNA of a protein coding gene: a 5 untranslated region, a protein coding region and a 3 untranslated region, designated 5UTR, PROTEIN CODING and 3UTR respectively.

[3838] VGAM277 RNA, herein designated VGAM RNA, binds complementarily to one or more host target binding sites located in untranslated regions of VGAM277 host target RNA, herein designated VGAM HOST TARGET RNA. This complementary binding is due to the fact that the nucleotide sequence of VGAM277 RNA, herein designated VGAM RNA, is an accurate or a partial inversed-reversed sequence of the nucleotide sequence of each of the host target binding sites. As an illustration, FIG. 1 shows 3 such host target binding sites, designated BINDING SITE I, BINDING SITE II and BINDING SITE III respectively. It is appreciated that the number of host target binding sites shown in FIG. 1 is meant as an illustration only, and is not meant to be limiting VGAM277 RNA, herein designated VGAM RNA, may have a different number of host target binding sites in untranslated regions of a VGAM277 host target RNA, herein designated VGAM HOST TARGET RNA. It is further appreciated that while FIG. 1 depicts host target binding sites in the 3UTR region, this is meant as an example only these host target binding sites may be located in the 3UTR region, the 5UTR region, or in both 3UTR and 5UTR regions.

[3839] The complementary binding of VGAM277 RNA, herein designated VGAM RNA, to host target binding sites on VGAM277 host target RNA, herein designated VGAM HOST TARGET RNA, such as BINDING SITE I, BINDING SITE II and BINDING SITE III, inhibits translation of VGAM277 host target RNA, herein designated VGAM HOST TARGET RNA, into VGAM277 host target protein, herein designated VGAM HOST TARGET PROTEIN. VGAM host target protein is therefore outlined by a broken line.

[3840] It is appreciated that VGAM277 host target gene, herein designated VGAM HOST TARGET GENE, in fact represents a plurality of VGAM277 host target genes. The mRNA of each one of this plurality of VGAM277 host target genes comprises one or more host target binding sites, each having a nucleotide sequence which is at least partly complementary to VGAM277 RNA, herein designated VGAM RNA, and which when bound by VGAM277 RNA, herein designated VGAM RNA, causes inhibition of translation of respective one or more VGAM277 host target proteins.

[3841] It is further appreciated by one skilled in the art that the mode of translational inhibition illustrated by FIG. 1 with specific reference to translational inhibition exerted by VGAM277 gene, herein designated VGAM GENE, on one or more VGAM277 host target gene, herein designated VGAM HOST TARGET GENE, is in fact common to other known non-viral miRNA genes. As mentioned hereinabove with reference to the background section, although a specific complementary binding site has been demonstrated only for some of the known miRNA genes (primarily Lin-4 and Let-7), all other recently discovered miRNA genes are also believed by those skilled in the art to modulate expression of other genes by complementary binding, although specific complementary binding sites of these other miRNA genes have not yet been found (Ruvkun G., Perspective: Glimpses of a tiny RNA world, Science 294, 779 (2001)).

[3842] It is yet further appreciated that a function of VGAM277 is inhibition of expression of host target genes, as part of a novel viral mechanism of attacking a host. Accordingly, utilities of VGAM277 include diagnosis, prevention and treatment of viral infection by Vaccinia virus. Specific functions, and accordingly utilities, of VGAM277 correlate with, and may be deduced from, the identity of the host target genes which VGAM277 binds and inhibits, and the function of these host target genes, as elaborated hereinbelow.

[3843] Nucleotide sequences of the VGAM277 precursor RNA, herein designated VGAM PRECURSOR RNA, and of the diced VGAM277 RNA, herein designated VGAM RNA, and a schematic representation of the secondary folding of VGAM277 folded precursor RNA, herein designated VGAM FOLDED PRECURSOR RNA, of VGAM277 are further described hereinbelow with reference to Table 1.

[3844] Nucleotide sequences of host target binding sites, such as BINDING SITE-I, BINDING SITE-II and BINDING SITE-III of FIG. 1, found on, and schematic representation of the complementarity of each of these host target binding sites to VGAM277 RNA, herein designated VGAM RNA, are described hereinbelow with reference to Table 2.

[3845] FIG. 1 further provides a conceptual description of another novel bioinformatically detected viral gene of the present invention, referred to here as Viral Genomic Address Messenger 278 (VGAM278) viral gene, which modulates expression of respective host target genes thereof, the function and utility of which host target genes is known in the art.

[3846] VGAM278 is a novel bioinformatically detected regulatory, non protein coding, viral micro RNA (miRNA) gene. The method by which VGAM278 was detected is described hereinabove with reference to FIGS. 2-8.

[3847] VGAM278 gene, herein designated VGAM GENE, is a viral gene contained in the genome of Vaccinia virus. VGAM278 host target gene, herein designated VGAM HOST TARGET GENE, is a human gene contained in the human genome.

[3848] VGAM278 gene, herein designated VGAM GENE, encodes a VGAM278 precursor RNA, herein designated VGAM PRECURSOR RNA. Similar to other miRNA genes, and unlike most ordinary genes, VGAM278 precursor RNA, herein designated VGAM PRECURSOR RNA, does not encode a protein. A nucleotide sequence identical or highly similar to the nucleotide sequence of VGAM278 precursor RNA is designated SEQ ID:264, and is provided hereinbelow with reference to the sequence listing part. Nucleotide sequence SEQ ID:264 is located at position 158423 relative to the genome of Vaccinia virus.

[3849] VGAM278 precursor RNA, herein designated VGAM PRECURSOR RNA, folds onto itself, forming VGAM278 folded precursor RNA, herein designated VGAM FOLDED PRECURSOR RNA, which has a two-dimensional hairpin structure. As is well known in the art, this hairpin structure, is typical of RNA encoded by miRNA genes, and is due to the fact that the nucleotide sequence of the first half of the RNA encoded by a miRNA gene is an accurate or partial inversed-reversed sequence of the nucleotide sequence of the second half thereof.

[3850] An enzyme complex designated DICER COMPLEX, dices the VGAM278 folded precursor RNA, herein designated VGAM FOLDED PRECURSOR RNA, into VGAM278 RNA, herein designated VGAM RNA, a single stranded ˜22 nt long RNA segment. As is known in the art, dicing of a hairpin structured RNA precursor product into a short ˜22 nt RNA segment is catalyzed by an enzyme complex comprising an enzyme called Dicer together with other necessary proteins. A probable (over 94%) nucleotide sequence of VGAM278 RNA is designated SEQ ID:613, and is provided hereinbelow with reference to the sequence listing part.

[3851] VGAM278 host target gene, herein designated VGAM HOST TARGET GENE, encodes a corresponding messenger RNA, VGAM278 host target RNA, herein designated VGAM HOST TARGET RNA. VGAM278 host target RNA, herein designated VGAM HOST TARGET RNA, comprises three regions, as is typical of mRNA of a protein coding gene: a 5 untranslated region, a protein coding region and a 3 untranslated region, designated 5UTR, PROTEIN CODING and 3UTR respectively.

[3852] VGAM278 RNA, herein designated VGAM RNA, binds complementarily to one or more host target binding sites located in untranslated regions of VGAM278 host target RNA, herein designated VGAM HOST TARGET RNA. This complementary binding is due to the fact that the nucleotide sequence of VGAM278 RNA, herein designated VGAM RNA, is an accurate or a partial inversed-reversed sequence of the nucleotide sequence of each of the host target binding sites. As an illustration, FIG. 1 shows 3 such host target binding sites, designated BINDING SITE I, BINDING SITE II and BINDING SITE III respectively. It is appreciated that the number of host target binding sites shown in FIG. 1 is meant as an illustration only, and is not meant to be limiting VGAM278 RNA, herein designated VGAM RNA, may have a different number of host target binding sites in untranslated regions of a VGAM278 host target RNA, herein designated VGAM HOST TARGET RNA. It is further appreciated that while FIG. 1 depicts host target binding sites in the 3UTR region, this is meant as an example only these host target binding sites may be located in the 3UTR region, the 5UTR region, or in both 3UTR and 5UTR regions.

[3853] The complementary binding of VGAM278 RNA, herein designated VGAM RNA, to host target binding sites on VGAM278 host target RNA, herein designated VGAM HOST TARGET RNA, such as BINDING SITE I, BINDING SITE II and BINDING SITE III, inhibits translation of VGAM278 host target RNA, herein designated VGAM HOST TARGET RNA, into VGAM278 host target protein, herein designated VGAM HOST TARGET PROTEIN. VGAM host target protein is therefore outlined by a broken line.

[3854] It is appreciated that VGAM278 host target gene, herein designated VGAM HOST TARGET GENE, in fact represents a plurality of VGAM278 host target genes. The mRNA of each one of this plurality of VGAM278 host target genes comprises one or more host target binding sites, each having a nucleotide sequence which is at least partly complementary to VGAM278 RNA, herein designated VGAM RNA, and which when bound by VGAM278 RNA, herein designated VGAM RNA, causes inhibition of translation of respective one or more VGAM278 host target proteins.

[3855] It is further appreciated by one skilled in the art that the mode of translational inhibition illustrated by FIG. 1 with specific reference to translational inhibition exerted by VGAM278 gene, herein designated VGAM GENE, on one or more VGAM278 host target gene, herein designated VGAM HOST TARGET GENE, is in fact common to other known non-viral miRNA genes. As mentioned hereinabove with reference to the background section, although a specific complementary binding site has been demonstrated only for some of the known miRNA genes (primarily Lin-4 and Let-7), all other recently discovered miRNA genes are also believed by those skilled in the art to modulate expression of other genes by complementary binding, although specific complementary binding sites of these other miRNA genes have not yet been found (Ruvkun G., Perspective: Glimpses of a tiny RNA world, Science 294, 779 (2001)).

[3856] It is yet further appreciated that a function of VGAM278 is inhibition of expression of host target genes, as part of a novel viral mechanism of attacking a host. Accordingly, utilities of VGAM278 include diagnosis, prevention and treatment of viral infection by Vaccinia virus. Specific functions, and accordingly utilities, of VGAM278 correlate with, and may be deduced from, the identity of the host target genes which VGAM278 binds and inhibits, and the function of these host target genes, as elaborated hereinbelow.

[3857] Nucleotide sequences of the VGAM278 precursor RNA, herein designated VGAM PRECURSOR RNA, and of the diced VGAM278 RNA, herein designated VGAM RNA, and a schematic representation of the secondary folding of VGAM278 folded precursor RNA, herein designated VGAM FOLDED PRECURSOR RNA, of VGAM278 are further described hereinbelow with reference to Table 1.

[3858] Nucleotide sequences of host target binding sites, such as BINDING SITE-I, BINDING SITE-II and BINDING SITE-III of FIG. 1, found on, and schematic representation of the complementarity of each of these host target binding sites to VGAM278 RNA, herein designated VGAM RNA, are described hereinbelow with reference to Table 2.

[3859] FIG. 1 further provides a conceptual description of another novel bioinformatically detected viral gene of the present invention, referred to here as Viral Genomic Address Messenger 279 (VGAM279) viral gene, which modulates expression of respective host target genes thereof, the function and utility of which host target genes is known in the art.

[3860] VGAM279 is a novel bioinformatically detected regulatory, non protein coding, viral micro RNA (miRNA) gene. The method by which VGAM279 was detected is described hereinabove with reference to FIGS. 2-8.

[3861] VGAM279 gene, herein designated VGAM GENE, is a viral gene contained in the genome of Vaccinia virus. VGAM279 host target gene, herein designated VGAM HOST TARGET GENE, is a human gene contained in the human genome.

[3862] VGAM279 gene, herein designated VGAM GENE, encodes a VGAM279 precursor RNA, herein designated VGAM PRECURSOR RNA. Similar to other miRNA genes, and unlike most ordinary genes, VGAM279 precursor RNA, herein designated VGAM PRECURSOR RNA, does not encode a protein. A nucleotide sequence identical or highly similar to the nucleotide sequence of VGAM279 precursor RNA is designated SEQ ID:265, and is provided hereinbelow with reference to the sequence listing part. Nucleotide sequence SEQ ID:265 is located at position 161106 relative to the genome of Vaccinia virus.

[3863] VGAM279 precursor RNA, herein designated VGAM PRECURSOR RNA, folds onto itself, forming VGAM279 folded precursor RNA, herein designated VGAM FOLDED PRECURSOR RNA, which has a two-dimensional hairpin structure. As is well known in the art, this hairpin structure, is typical of RNA encoded by miRNA genes, and is due to the fact that the nucleotide sequence of the first half of the RNA encoded by a miRNA gene is an accurate or partial inversed-reversed sequence of the nucleotide sequence of the second half thereof.

[3864] An enzyme complex designated DICER COMPLEX, dices the VGAM279 folded precursor RNA, herein designated VGAM FOLDED PRECURSOR RNA, into VGAM279 RNA, herein designated VGAM RNA, a single stranded ˜22 nt long RNA segment. As is known in the art, dicing of a hairpin structured RNA precursor product into a short ˜22 nt RNA segment is catalyzed by an enzyme complex comprising an enzyme called Dicer together with other necessary proteins. A probable (over 83%) nucleotide sequence of VGAM279 RNA is designated SEQ ID:614, and is provided hereinbelow with reference to the sequence listing part.

[3865] VGAM279 host target gene, herein designated VGAM HOST TARGET GENE, encodes a corresponding messenger RNA, VGAM279 host target RNA, herein designated VGAM HOST TARGET RNA. VGAM279 host target RNA, herein designated VGAM HOST TARGET RNA, comprises three regions, as is typical of mRNA of a protein coding gene: a 5 untranslated region, a protein coding region and a 3 untranslated region, designated 5UTR, PROTEIN CODING and 3UTR respectively.

[3866] VGAM279 RNA, herein designated VGAM RNA, binds complementarily to one or more host target binding sites located in untranslated regions of VGAM279 host target RNA, herein designated VGAM HOST TARGET RNA. This complementary binding is due to the fact that the nucleotide sequence of VGAM279 RNA, herein designated VGAM RNA, is an accurate or a partial inversed-reversed sequence of the nucleotide sequence of each of the host target binding sites. As an illustration, FIG. 1 shows 3 such host target binding sites, designated BINDING SITE I, BINDING SITE II and BINDING SITE III respectively. It is appreciated that the number of host target binding sites shown in FIG. 1 is meant as an illustration only, and is not meant to be limiting VGAM279 RNA, herein designated VGAM RNA, may have a different number of host target binding sites in untranslated regions of a VGAM279 host target RNA, herein designated VGAM HOST TARGET RNA. It is further appreciated that while FIG. 1 depicts host target binding sites in the 3UTR region, this is meant as an example only these host target binding sites may be located in the 3UTR region, the 5UTR region, or in both 3UTR and 5UTR regions.

[3867] The complementary binding of VGAM279 RNA, herein designated VGAM RNA, to host target binding sites on VGAM279 host target RNA, herein designated VGAM HOST TARGET RNA, such as BINDING SITE I, BINDING SITE II and BINDING SITE III, inhibits translation of VGAM279 host target RNA, herein designated VGAM HOST TARGET RNA, into VGAM279 host target protein, herein designated VGAM HOST TARGET PROTEIN. VGAM host target protein is therefore outlined by a broken line.

[3868] It is appreciated that VGAM279 host target gene, herein designated VGAM HOST TARGET GENE, in fact represents a plurality of VGAM279 host target genes. The mRNA of each one of this plurality of VGAM279 host target genes comprises one or more host target binding sites, each having a nucleotide sequence which is at least partly complementary to VGAM279 RNA, herein designated VGAM RNA, and which when bound by VGAM279 RNA, herein designated VGAM RNA, causes inhibition of translation of respective one or more VGAM279 host target proteins.

[3869] It is further appreciated by one skilled in the art that the mode of translational inhibition illustrated by FIG. 1 with specific reference to translational inhibition exerted by VGAM279 gene, herein designated VGAM GENE, on one or more VGAM279 host target gene, herein designated VGAM HOST TARGET GENE, is in fact common to other known non-viral miRNA genes. As mentioned hereinabove with reference to the background section, although a specific complementary binding site has been demonstrated only for some of the known miRNA genes (primarily Lin-4 and Let-7), all other recently discovered miRNA genes are also believed by those skilled in the art to modulate expression of other genes by complementary binding, although specific complementary binding sites of these other miRNA genes have not yet been found (Ruvkun G., Perspective: Glimpses of a tiny RNA world, Science 294, 779 (2001)).

[3870] It is yet further appreciated that a function of VGAM279 is inhibition of expression of host target genes, as part of a novel viral mechanism of attacking a host. Accordingly, utilities of VGAM279 include diagnosis, prevention and treatment of viral infection by Vaccinia virus. Specific functions, and accordingly utilities, of VGAM279 correlate with, and may be deduced from, the identity of the host target genes which VGAM279 binds and inhibits, and the function of these host target genes, as elaborated hereinbelow.

[3871] Nucleotide sequences of the VGAM279 precursor RNA, herein designated VGAM PRECURSOR RNA, and of the diced VGAM279 RNA, herein designated VGAM RNA, and a schematic representation of the secondary folding of VGAM279 folded precursor RNA, herein designated VGAM FOLDED PRECURSOR RNA, of VGAM279 are further described hereinbelow with reference to Table 1.

[3872] Nucleotide sequences of host target binding sites, such as BINDING SITE-I, BINDING SITE-II and BINDING SITE-III of FIG. 1, found on, and schematic representation of the complementarity of each of these host target binding sites to VGAM279 RNA, herein designated VGAM RNA, are described hereinbelow with reference to Table 2.

[3873] FIG. 1 further provides a conceptual description of another novel bioinformatically detected viral gene of the present invention, referred to here as Viral Genomic Address Messenger 280 (VGAM280) viral gene, which modulates expression of respective host target genes thereof, the function and utility of which host target genes is known in the art.

[3874] VGAM280 is a novel bioinformatically detected regulatory, non protein coding, viral micro RNA (miRNA) gene. The method by which VGAM280 was detected is described hereinabove with reference to FIGS. 2-8.

[3875] VGAM280 gene, herein designated VGAM GENE, is a viral gene contained in the genome of Vaccinia virus. VGAM280 host target gene, herein designated VGAM HOST TARGET GENE, is a human gene contained in the human genome.

[3876] VGAM280 gene, herein designated VGAM GENE, encodes a VGAM280 precursor RNA, herein designated VGAM PRECURSOR RNA. Similar to other miRNA genes, and unlike most ordinary genes, VGAM280 precursor RNA, herein designated VGAM PRECURSOR RNA, does not encode a protein. A nucleotide sequence identical or highly similar to the nucleotide sequence of VGAM280 precursor RNA is designated SEQ ID:266, and is provided hereinbelow with reference to the sequence listing part. Nucleotide sequence SEQ ID:266 is located at position 159680 relative to the genome of Vaccinia virus.

[3877] VGAM280 precursor RNA, herein designated VGAM PRECURSOR RNA, folds onto itself, forming VGAM280 folded precursor RNA, herein designated VGAM FOLDED PRECURSOR RNA, which has a two-dimensional hairpin structure. As is well known in the art, this hairpin structure, is typical of RNA encoded by miRNA genes, and is due to the fact that the nucleotide sequence of the first half of the RNA encoded by a miRNA gene is an accurate or partial inversed-reversed sequence of the nucleotide sequence of the second half thereof.

[3878] An enzyme complex designated DICER COMPLEX, dices the VGAM280 folded precursor RNA, herein designated VGAM FOLDED PRECURSOR RNA, into VGAM280 RNA, herein designated VGAM RNA, a single stranded ˜22 nt long RNA segment. As is known in the art, dicing of a hairpin structured RNA precursor product into a short ˜22 nt RNA segment is catalyzed by an enzyme complex comprising an enzyme called Dicer together with other necessary proteins. A probable (over 83%) nucleotide sequence of VGAM280 RNA is designated SEQ ID:615, and is provided hereinbelow with reference to the sequence listing part.

[3879] VGAM280 host target gene, herein designated VGAM HOST TARGET GENE, encodes a corresponding messenger RNA, VGAM280 host target RNA, herein designated VGAM HOST TARGET RNA. VGAM280 host target RNA, herein designated VGAM HOST TARGET RNA, comprises three regions, as is typical of mRNA of a protein coding gene: a 5 untranslated region, a protein coding region and a 3 untranslated region, designated 5UTR, PROTEIN CODING and 3UTR respectively.

[3880] VGAM280 RNA, herein designated VGAM RNA, binds complementarily to one or more host target binding sites located in untranslated regions of VGAM280 host target RNA, herein designated VGAM HOST TARGET RNA. This complementary binding is due to the fact that the nucleotide sequence of VGAM280 RNA, herein designated VGAM RNA, is an accurate or a partial inversed-reversed sequence of the nucleotide sequence of each of the host target binding sites. As an illustration, FIG. 1 shows 3 such host target binding sites, designated BINDING SITE I, BINDING SITE II and BINDING SITE III respectively. It is appreciated that the number of host target binding sites shown in FIG. 1 is meant as an illustration only, and is not meant to be limiting VGAM280 RNA, herein designated VGAM RNA, may have a different number of host target binding sites in untranslated regions of a VGAM280 host target RNA, herein designated VGAM HOST TARGET RNA. It is further appreciated that while FIG. 1 depicts host target binding sites in the 3UTR region, this is meant as an example only these host target binding sites may be located in the 3UTR region, the 5UTR region, or in both 3UTR and 5UTR regions.

[3881] The complementary binding of VGAM280 RNA, herein designated VGAM RNA, to host target binding sites on VGAM280 host target RNA, herein designated VGAM HOST TARGET RNA, such as BINDING SITE I, BINDING SITE II and BINDING SITE III, inhibits translation of VGAM280 host target RNA, herein designated VGAM HOST TARGET RNA, into VGAM280 host target protein, herein designated VGAM HOST TARGET PROTEIN. VGAM host target protein is therefore outlined by a broken line.

[3882] It is appreciated that VGAM280 host target gene, herein designated VGAM HOST TARGET GENE, in fact represents a plurality of VGAM280 host target genes. The mRNA of each one of this plurality of VGAM280 host target genes comprises one or more host target binding sites, each having a nucleotide sequence which is at least partly complementary to VGAM280 RNA, herein designated VGAM RNA, and which when bound by VGAM280 RNA, herein designated VGAM RNA, causes inhibition of translation of respective one or more VGAM280 host target proteins.

[3883] It is further appreciated by one skilled in the art that the mode of translational inhibition illustrated by FIG. 1 with specific reference to translational inhibition exerted by VGAM280 gene, herein designated VGAM GENE, on one or more VGAM280 host target gene, herein designated VGAM HOST TARGET GENE, is in fact common to other known non-viral miRNA genes. As mentioned hereinabove with reference to the background section, although a specific complementary binding site has been demonstrated only for some of the known miRNA genes (primarily Lin-4 and Let-7), all other recently discovered miRNA genes are also believed by those skilled in the art to modulate expression of other genes by complementary binding, although specific complementary binding sites of these other miRNA genes have not yet been found (Ruvkun G., Perspective: Glimpses of a tiny RNA world, Science 294, 779 (2001)).

[3884] It is yet further appreciated that a function of VGAM280 is inhibition of expression of host target genes, as part of a novel viral mechanism of attacking a host. Accordingly, utilities of VGAM280 include diagnosis, prevention and treatment of viral infection by Vaccinia virus. Specific functions, and accordingly utilities, of VGAM280 correlate with, and may be deduced from, the identity of the host target genes which VGAM280 binds and inhibits, and the function of these host target genes, as elaborated hereinbelow.

[3885] Nucleotide sequences of the VGAM280 precursor RNA, herein designated VGAM PRECURSOR RNA, and of the diced VGAM280 RNA, herein designated VGAM RNA, and a schematic representation of the secondary folding of VGAM280 folded precursor RNA, herein designated VGAM FOLDED PRECURSOR RNA, of VGAM280 are further described hereinbelow with reference to Table 1.

[3886] Nucleotide sequences of host target binding sites, such as BINDING SITE-I, BINDING SITE-II and BINDING SITE-III of FIG. 1, found on, and schematic representation of the complementarity of each of these host target binding sites to VGAM280 RNA, herein designated VGAM RNA, are described hereinbelow with reference to Table 2.

[3887] FIG. 1 further provides a conceptual description of another novel bioinformatically detected viral gene of the present invention, referred to here as Viral Genomic Address Messenger 281 (VGAM281) viral gene, which modulates expression of respective host target genes thereof, the function and utility of which host target genes is known in the art.

[3888] VGAM281 is a novel bioinformatically detected regulatory, non protein coding, viral micro RNA (miRNA) gene. The method by which VGAM281 was detected is described hereinabove with reference to FIGS. 2-8.

[3889] VGAM281 gene, herein designated VGAM GENE, is a viral gene contained in the genome of Vaccinia virus. VGAM281 host target gene, herein designated VGAM HOST TARGET GENE, is a human gene contained in the human genome.

[3890] VGAM281 gene, herein designated VGAM GENE, encodes a VGAM281 precursor RNA, herein designated VGAM PRECURSOR RNA. Similar to other miRNA genes, and unlike most ordinary genes, VGAM281 precursor RNA, herein designated VGAM PRECURSOR RNA, does not encode a protein. A nucleotide sequence identical or highly similar to the nucleotide sequence of VGAM281 precursor RNA is designated SEQ ID:267, and is provided hereinbelow with reference to the sequence listing part. Nucleotide sequence SEQ ID:267 is located at position 160226 relative to the genome of Vaccinia virus.

[3891] VGAM281 precursor RNA, herein designated VGAM PRECURSOR RNA, folds onto itself, forming VGAM281 folded precursor RNA, herein designated VGAM FOLDED PRECURSOR RNA, which has a two-dimensional hairpin structure. As is well known in the art, this hairpin structure, is typical of RNA encoded by miRNA genes, and is due to the fact that the nucleotide sequence of the first half of the RNA encoded by a miRNA gene is an accurate or partial inversed-reversed sequence of the nucleotide sequence of the second half thereof.

[3892] An enzyme complex designated DICER COMPLEX, dices the VGAM281 folded precursor RNA, herein designated VGAM FOLDED PRECURSOR RNA, into VGAM281 RNA, herein designated VGAM RNA, a single stranded ˜22 nt long RNA segment. As is known in the art, dicing of a hairpin structured RNA precursor product into a short ˜22 nt RNA segment is catalyzed by an enzyme complex comprising an enzyme called Dicer together with other necessary proteins. A probable (over 73%) nucleotide sequence of VGAM281 RNA is designated SEQ ID:616, and is provided hereinbelow with reference to the sequence listing part.

[3893] VGAM281 host target gene, herein designated VGAM HOST TARGET GENE, encodes a corresponding messenger RNA, VGAM281 host target RNA, herein designated VGAM HOST TARGET RNA. VGAM281 host target RNA, herein designated VGAM HOST TARGET RNA, comprises three regions, as is typical of mRNA of a protein coding gene: a 5 untranslated region, a protein coding region and a 3 untranslated region, designated 5UTR, PROTEIN CODING and 3UTR respectively.

[3894] VGAM281 RNA, herein designated VGAM RNA, binds complementarily to one or more host target binding sites located in untranslated regions of VGAM281 host target RNA, herein designated VGAM HOST TARGET RNA. This complementary binding is due to the fact that the nucleotide sequence of VGAM281 RNA, herein designated VGAM RNA, is an accurate or a partial inversed-reversed sequence of the nucleotide sequence of each of the host target binding sites. As an illustration, FIG. 1 shows 3 such host target binding sites, designated BINDING SITE I, BINDING SITE II and BINDING SITE III respectively. It is appreciated that the number of host target binding sites shown in FIG. 1 is meant as an illustration only, and is not meant to be limiting VGAM281 RNA, herein designated VGAM RNA, may have a different number of host target binding sites in untranslated regions of a VGAM281 host target RNA, herein designated VGAM HOST TARGET RNA. It is further appreciated that while FIG. 1 depicts host target binding sites in the 3UTR region, this is meant as an example only these host target binding sites may be located in the 3UTR region, the 5UTR region, or in both 3UTR and 5UTR regions.

[3895] The complementary binding of VGAM281 RNA, herein designated VGAM RNA, to host target binding sites on VGAM281 host target RNA, herein designated VGAM HOST TARGET RNA, such as BINDING SITE I, BINDING SITE II and BINDING SITE III, inhibits translation of VGAM281 host target RNA, herein designated VGAM HOST TARGET RNA, into VGAM281 host target protein, herein designated VGAM HOST TARGET PROTEIN. VGAM host target protein is therefore outlined by a broken line.

[3896] It is appreciated that VGAM281 host target gene, herein designated VGAM HOST TARGET GENE, in fact represents a plurality of VGAM281 host target genes. The mRNA of each one of this plurality of VGAM281 host target genes comprises one or more host target binding sites, each having a nucleotide sequence which is at least partly complementary to VGAM281 RNA, herein designated VGAM RNA, and which when bound by VGAM281 RNA, herein designated VGAM RNA, causes inhibition of translation of respective one or more VGAM281 host target proteins.

[3897] It is further appreciated by one skilled in the art that the mode of translational inhibition illustrated by FIG. 1 with specific reference to translational inhibition exerted by VGAM281 gene, herein designated VGAM GENE, on one or more VGAM281 host target gene, herein designated VGAM HOST TARGET GENE, is in fact common to other known non-viral miRNA genes. As mentioned hereinabove with reference to the background section, although a specific complementary binding site has been demonstrated only for some of the known miRNA genes (primarily Lin-4 and Let-7), all other recently discovered miRNA genes are also believed by those skilled in the art to modulate expression of other genes by complementary binding, although specific complementary binding sites of these other miRNA genes have not yet been found (Ruvkun G., Perspective: Glimpses of a tiny RNA world, Science 294, 779 (2001)).

[3898] It is yet further appreciated that a function of VGAM281 is inhibition of expression of host target genes, as part of a novel viral mechanism of attacking a host. Accordingly, utilities of VGAM281 include diagnosis, prevention and treatment of viral infection by Vaccinia virus. Specific functions, and accordingly utilities, of VGAM281 correlate with, and may be deduced from, the identity of the host target genes which VGAM281 binds and inhibits, and the function of these host target genes, as elaborated hereinbelow.

[3899] Nucleotide sequences of the VGAM281 precursor RNA, herein designated VGAM PRECURSOR RNA, and of the diced VGAM281 RNA, herein designated VGAM RNA, and a schematic representation of the secondary folding of VGAM281 folded precursor RNA, herein designated VGAM FOLDED PRECURSOR RNA, of VGAM281 are further described hereinbelow with reference to Table 1.

[3900] Nucleotide sequences of host target binding sites, such as BINDING SITE-I, BINDING SITE-II and BINDING SITE-III of FIG. 1, found on, and schematic representation of the complementarity of each of these host target binding sites to VGAM281 RNA, herein designated VGAM RNA, are described hereinbelow with reference to Table 2.

[3901] FIG. 1 further provides a conceptual description of another novel bioinformatically detected viral gene of the present invention, referred to here as Viral Genomic Address Messenger 282 (VGAM282) viral gene, which modulates expression of respective host target genes thereof, the function and utility of which host target genes is known in the art.

[3902] VGAM282 is a novel bioinformatically detected regulatory, non protein coding, viral micro RNA (miRNA) gene. The method by which VGAM282 was detected is described hereinabove with reference to FIGS. 2-8.

[3903] VGAM282 gene, herein designated VGAM GENE, is a viral gene contained in the genome of Vaccinia virus. VGAM282 host target gene, herein designated VGAM HOST TARGET GENE, is a human gene contained in the human genome.

[3904] VGAM282 gene, herein designated VGAM GENE, encodes a VGAM282 precursor RNA, herein designated VGAM PRECURSOR RNA. Similar to other miRNA genes, and unlike most ordinary genes, VGAM282 precursor RNA, herein designated VGAM PRECURSOR RNA, does not encode a protein. A nucleotide sequence identical or highly similar to the nucleotide sequence of VGAM282 precursor RNA is designated SEQ ID:268, and is provided hereinbelow with reference to the sequence listing part. Nucleotide sequence SEQ ID:268 is located at position 161325 relative to the genome of Vaccinia virus.

[3905] VGAM282 precursor RNA, herein designated VGAM PRECURSOR RNA, folds onto itself, forming VGAM282 folded precursor RNA, herein designated VGAM FOLDED PRECURSOR RNA, which has a two-dimensional hairpin structure. As is well known in the art, this hairpin structure, is typical of RNA encoded by miRNA genes, and is due to the fact that the nucleotide sequence of the first half of the RNA encoded by a miRNA gene is an accurate or partial inversed-reversed sequence of the nucleotide sequence of the second half thereof.

[3906] An enzyme complex designated DICER COMPLEX, dices the VGAM282 folded precursor RNA, herein designated VGAM FOLDED PRECURSOR RNA, into VGAM282 RNA, herein designated VGAM RNA, a single stranded ˜22 nt long RNA segment. As is known in the art, dicing of a hairpin structured RNA precursor product into a short ˜22 nt RNA segment is catalyzed by an enzyme complex comprising an enzyme called Dicer together with other necessary proteins. A probable (over 75%) nucleotide sequence of VGAM282 RNA is designated SEQ ID:617, and is provided hereinbelow with reference to the sequence listing part.

[3907] VGAM282 host target gene, herein designated VGAM HOST TARGET GENE, encodes a corresponding messenger RNA, VGAM282 host target RNA, herein designated VGAM HOST TARGET RNA. VGAM282 host target RNA, herein designated VGAM HOST TARGET RNA, comprises three regions, as is typical of mRNA of a protein coding gene: a 5 untranslated region, a protein coding region and a 3 untranslated region, designated 5UTR, PROTEIN CODING and 3UTR respectively.

[3908] VGAM282 RNA, herein designated VGAM RNA, binds complementarily to one or more host target binding sites located in untranslated regions of VGAM282 host target RNA, herein designated VGAM HOST TARGET RNA. This complementary binding is due to the fact that the nucleotide sequence of VGAM282 RNA, herein designated VGAM RNA, is an accurate or a partial inversed-reversed sequence of the nucleotide sequence of each of the host target binding sites. As an illustration, FIG. 1 shows 3 such host target binding sites, designated BINDING SITE I, BINDING SITE II and BINDING SITE III respectively. It is appreciated that the number of host target binding sites shown in FIG. 1 is meant as an illustration only, and is not meant to be limiting VGAM282 RNA, herein designated VGAM RNA, may have a different number of host target binding sites in untranslated regions of a VGAM282 host target RNA, herein designated VGAM HOST TARGET RNA. It is further appreciated that while FIG. 1 depicts host target binding sites in the 3UTR region, this is meant as an example only these host target binding sites may be located in the 3UTR region, the 5UTR region, or in both 3UTR and 5UTR regions.

[3909] The complementary binding of VGAM282 RNA, herein designated VGAM RNA, to host target binding sites on VGAM282 host target RNA, herein designated VGAM HOST TARGET RNA, such as BINDING SITE I, BINDING SITE II and BINDING SITE III, inhibits translation of VGAM282 host target RNA, herein designated VGAM HOST TARGET RNA, into VGAM282 host target protein, herein designated VGAM HOST TARGET PROTEIN. VGAM host target protein is therefore outlined by a broken line.

[3910] It is appreciated that VGAM282 host target gene, herein designated VGAM HOST TARGET GENE, in fact represents a plurality of VGAM282 host target genes. The mRNA of each one of this plurality of VGAM282 host target genes comprises one or more host target binding sites, each having a nucleotide sequence which is at least partly complementary to VGAM282 RNA, herein designated VGAM RNA, and which when bound by VGAM282 RNA, herein designated VGAM RNA, causes inhibition of translation of respective one or more VGAM282 host target proteins.

[3911] It is further appreciated by one skilled in the art that the mode of translational inhibition illustrated by FIG. 1 with specific reference to translational inhibition exerted by VGAM282 gene, herein designated VGAM GENE, on one or more VGAM282 host target gene, herein designated VGAM HOST TARGET GENE, is in fact common to other known non-viral miRNA genes. As mentioned hereinabove with reference to the background section, although a specific complementary binding site has been demonstrated only for some of the known miRNA genes (primarily Lin-4 and Let-7), all other recently discovered miRNA genes are also believed by those skilled in the art to modulate expression of other genes by complementary binding, although specific complementary binding sites of these other miRNA genes have not yet been found (Ruvkun G., Perspective: Glimpses of a tiny RNA world, Science 294, 779 (2001)).

[3912] It is yet further appreciated that a function of VGAM282 is inhibition of expression of host target genes, as part of a novel viral mechanism of attacking a host. Accordingly, utilities of VGAM282 include diagnosis, prevention and treatment of viral infection by Vaccinia virus. Specific functions, and accordingly utilities, of VGAM282 correlate with, and may be deduced from, the identity of the host target genes which VGAM282 binds and inhibits, and the function of these host target genes, as elaborated hereinbelow.

[3913] Nucleotide sequences of the VGAM282 precursor RNA, herein designated VGAM PRECURSOR RNA, and of the diced VGAM282 RNA, herein designated VGAM RNA, and a schematic representation of the secondary folding of VGAM282 folded precursor RNA, herein designated VGAM FOLDED PRECURSOR RNA, of VGAM282 are further described hereinbelow with reference to Table 1.

[3914] Nucleotide sequences of host target binding sites, such as BINDING SITE-I, BINDING SITE-II and BINDING SITE-III of FIG. 1, found on, and schematic representation of the complementarity of each of these host target binding sites to VGAM282 RNA, herein designated VGAM RNA, are described hereinbelow with reference to Table 2.

[3915] FIG. 1 further provides a conceptual description of another novel bioinformatically detected viral gene of the present invention, referred to here as Viral Genomic Address Messenger 283 (VGAM283) viral gene, which modulates expression of respective host target genes thereof, the function and utility of which host target genes is known in the art.

[3916] VGAM283 is a novel bioinformatically detected regulatory, non protein coding, viral micro RNA (miRNA) gene. The method by which VGAM283 was detected is described hereinabove with reference to FIGS. 2-8.

[3917] VGAM283 gene, herein designated VGAM GENE, is a viral gene contained in the genome of Vaccinia virus. VGAM283 host target gene, herein designated VGAM HOST TARGET GENE, is a human gene contained in the human genome.

[3918] VGAM283 gene, herein designated VGAM GENE, encodes a VGAM283 precursor RNA, herein designated VGAM PRECURSOR RNA. Similar to other miRNA genes, and unlike most ordinary genes, VGAM283 precursor RNA, herein designated VGAM PRECURSOR RNA, does not encode a protein. A nucleotide sequence identical or highly similar to the nucleotide sequence of VGAM283 precursor RNA is designated SEQ ID:269, and is provided hereinbelow with reference to the sequence listing part. Nucleotide sequence SEQ ID:269 is located at position 158874 relative to the genome of Vaccinia virus.

[3919] VGAM283 precursor RNA, herein designated VGAM PRECURSOR RNA, folds onto itself, forming VGAM283 folded precursor RNA, herein designated VGAM FOLDED PRECURSOR RNA, which has a two-dimensional hairpin structure. As is well known in the art, this hairpin structure, is typical of RNA encoded by miRNA genes, and is due to the fact that the nucleotide sequence of the first half of the RNA encoded by a miRNA gene is an accurate or partial inversed-reversed sequence of the nucleotide sequence of the second half thereof.

[3920] An enzyme complex designated DICER COMPLEX, dices the VGAM283 folded precursor RNA, herein designated VGAM FOLDED PRECURSOR RNA, into VGAM283 RNA, herein designated VGAM RNA, a single stranded ˜22 nt long RNA segment. As is known in the art, dicing of a hairpin structured RNA precursor product into a short ˜22 nt RNA segment is catalyzed by an enzyme complex comprising an enzyme called Dicer together with other necessary proteins. A probable (over 87%) nucleotide sequence of VGAM283 RNA is designated SEQ ID:618, and is provided hereinbelow with reference to the sequence listing part.

[3921] VGAM283 host target gene, herein designated VGAM HOST TARGET GENE, encodes a corresponding messenger RNA, VGAM283 host target RNA, herein designated VGAM HOST TARGET RNA. VGAM283 host target RNA, herein designated VGAM HOST TARGET RNA, comprises three regions, as is typical of mRNA of a protein coding gene: a 5 untranslated region, a protein coding region and a 3 untranslated region, designated 5UTR, PROTEIN CODING and 3UTR respectively.

[3922] VGAM283 RNA, herein designated VGAM RNA, binds complementarily to one or more host target binding sites located in untranslated regions of VGAM283 host target RNA, herein designated VGAM HOST TARGET RNA. This complementary binding is due to the fact that the nucleotide sequence of VGAM283 RNA, herein designated VGAM RNA, is an accurate or a partial inversed-reversed sequence of the nucleotide sequence of each of the host target binding sites. As an illustration, FIG. 1 shows 3 such host target binding sites, designated BINDING SITE I, BINDING SITE II and BINDING SITE III respectively. It is appreciated that the number of host target binding sites shown in FIG. 1 is meant as an illustration only, and is not meant to be limiting VGAM283 RNA, herein designated VGAM RNA, may have a different number of host target binding sites in untranslated regions of a VGAM283 host target RNA, herein designated VGAM HOST TARGET RNA. It is further appreciated that while FIG. 1 depicts host target binding sites in the 3UTR region, this is meant as an example only these host target binding sites may be located in the 3UTR region, the 5UTR region, or in both 3UTR and 5UTR regions.

[3923] The complementary binding of VGAM283 RNA, herein designated VGAM RNA, to host target binding sites on VGAM283 host target RNA, herein designated VGAM HOST TARGET RNA, such as BINDING SITE I, BINDING SITE II and BINDING SITE III, inhibits translation of VGAM283 host target RNA, herein designated VGAM HOST TARGET RNA, into VGAM283 host target protein, herein designated VGAM HOST TARGET PROTEIN. VGAM host target protein is therefore outlined by a broken line.

[3924] It is appreciated that VGAM283 host target gene, herein designated VGAM HOST TARGET GENE, in fact represents a plurality of VGAM283 host target genes. The mRNA of each one of this plurality of VGAM283 host target genes comprises one or more host target binding sites, each having a nucleotide sequence which is at least partly complementary to VGAM283 RNA, herein designated VGAM RNA, and which when bound by VGAM283 RNA, herein designated VGAM RNA, causes inhibition of translation of respective one or more VGAM283 host target proteins.

[3925] It is further appreciated by one skilled in the art that the mode of translational inhibition illustrated by FIG. 1 with specific reference to translational inhibition exerted by VGAM283 gene, herein designated VGAM GENE, on one or more VGAM283 host target gene, herein designated VGAM HOST TARGET GENE, is in fact common to other known non-viral miRNA genes. As mentioned hereinabove with reference to the background section, although a specific complementary binding site has been demonstrated only for some of the known miRNA genes (primarily Lin-4 and Let-7), all other recently discovered miRNA genes are also believed by those skilled in the art to modulate expression of other genes by complementary binding, although specific complementary binding sites of these other miRNA genes have not yet been found (Ruvkun G., Perspective: Glimpses of a tiny RNA world, Science 294, 779 (2001)).

[3926] It is yet further appreciated that a function of VGAM283 is inhibition of expression of host target genes, as part of a novel viral mechanism of attacking a host. Accordingly, utilities of VGAM283 include diagnosis, prevention and treatment of viral infection by Vaccinia virus. Specific functions, and accordingly utilities, of VGAM283 correlate with, and may be deduced from, the identity of the host target genes which VGAM283 binds and inhibits, and the function of these host target genes, as elaborated hereinbelow.

[3927] Nucleotide sequences of the VGAM283 precursor RNA, herein designated VGAM PRECURSOR RNA, and of the diced VGAM283 RNA, herein designated VGAM RNA, and a schematic representation of the secondary folding of VGAM283 folded precursor RNA, herein designated VGAM FOLDED PRECURSOR RNA, of VGAM283 are further described hereinbelow with reference to Table 1.

[3928] Nucleotide sequences of host target binding sites, such as BINDING SITE-I, BINDING SITE-II and BINDING SITE-III of FIG. 1, found on, and schematic representation of the complementarity of each of these host target binding sites to VGAM283 RNA, herein designated VGAM RNA, are described hereinbelow with reference to Table 2.

[3929] FIG. 1 further provides a conceptual description of another novel bioinformatically detected viral gene of the present invention, referred to here as Viral Genomic Address Messenger 284 (VGAM284) viral gene, which modulates expression of respective host target genes thereof, the function and utility of which host target genes is known in the art.

[3930] VGAM284 is a novel bioinformatically detected regulatory, non protein coding, viral micro RNA (miRNA) gene. The method by which VGAM284 was detected is described hereinabove with reference to FIGS. 2-8.

[3931] VGAM284 gene, herein designated VGAM GENE, is a viral gene contained in the genome of Vaccinia virus. VGAM284 host target gene, herein designated VGAM HOST TARGET GENE, is a human gene contained in the human genome.

[3932] VGAM284 gene, herein designated VGAM GENE, encodes a VGAM284 precursor RNA, herein designated VGAM PRECURSOR RNA. Similar to other miRNA genes, and unlike most ordinary genes, VGAM284 precursor RNA, herein designated VGAM PRECURSOR RNA, does not encode a protein. A nucleotide sequence identical or highly similar to the nucleotide sequence of VGAM284 precursor RNA is designated SEQ ID:270, and is provided hereinbelow with reference to the sequence listing part. Nucleotide sequence SEQ ID:270 is located at position 159230 relative to the genome of Vaccinia virus.

[3933] VGAM284 precursor RNA, herein designated VGAM PRECURSOR RNA, folds onto itself, forming VGAM284 folded precursor RNA, herein designated VGAM FOLDED PRECURSOR RNA, which has a two-dimensional hairpin structure. As is well known in the art, this hairpin structure, is typical of RNA encoded by miRNA genes, and is due to the fact that the nucleotide sequence of the first half of the RNA encoded by a miRNA gene is an accurate or partial inversed-reversed sequence of the nucleotide sequence of the second half thereof.

[3934] An enzyme complex designated DICER COMPLEX, dices the VGAM284 folded precursor RNA, herein designated VGAM FOLDED PRECURSOR RNA, into VGAM284 RNA, herein designated VGAM RNA, a single stranded ˜22 nt long RNA segment. As is known in the art, dicing of a hairpin structured RNA precursor product into a short ˜22 nt RNA segment is catalyzed by an enzyme complex comprising an enzyme called Dicer together with other necessary proteins. A probable (over 75%) nucleotide sequence of VGAM284 RNA is designated SEQ ID:619, and is provided hereinbelow with reference to the sequence listing part.

[3935] VGAM284 host target gene, herein designated VGAM HOST TARGET GENE, encodes a corresponding messenger RNA, VGAM284 host target RNA, herein designated VGAM HOST TARGET RNA. VGAM284 host target RNA, herein designated VGAM HOST TARGET RNA, comprises three regions, as is typical of mRNA of a protein coding gene: a 5 untranslated region, a protein coding region and a 3 untranslated region, designated 5UTR, PROTEIN CODING and 3UTR respectively.

[3936] VGAM284 RNA, herein designated VGAM RNA, binds complementarily to one or more host target binding sites located in untranslated regions of VGAM284 host target RNA, herein designated VGAM HOST TARGET RNA. This complementary binding is due to the fact that the nucleotide sequence of VGAM284 RNA, herein designated VGAM RNA, is an accurate or a partial inversed-reversed sequence of the nucleotide sequence of each of the host target binding sites. As an illustration, FIG. 1 shows 3 such host target binding sites, designated BINDING SITE I, BINDING SITE II and BINDING SITE III respectively. It is appreciated that the number of host target binding sites shown in FIG. 1 is meant as an illustration only, and is not meant to be limiting VGAM284 RNA, herein designated VGAM RNA, may have a different number of host target binding sites in untranslated regions of a VGAM284 host target RNA, herein designated VGAM HOST TARGET RNA. It is further appreciated that while FIG. 1 depicts host target binding sites in the 3UTR region, this is meant as an example only these host target binding sites may be located in the 3UTR region, the 5UTR region, or in both 3UTR and 5UTR regions.

[3937] The complementary binding of VGAM284 RNA, herein designated VGAM RNA, to host target binding sites on VGAM284 host target RNA, herein designated VGAM HOST TARGET RNA, such as BINDING SITE I, BINDING SITE II and BINDING SITE III, inhibits translation of VGAM284 host target RNA, herein designated VGAM HOST TARGET RNA, into VGAM284 host target protein, herein designated VGAM HOST TARGET PROTEIN. VGAM host target protein is therefore outlined by a broken line.

[3938] It is appreciated that VGAM284 host target gene, herein designated VGAM HOST TARGET GENE, in fact represents a plurality of VGAM284 host target genes. The mRNA of each one of this plurality of VGAM284 host target genes comprises one or more host target binding sites, each having a nucleotide sequence which is at least partly complementary to VGAM284 RNA, herein designated VGAM RNA, and which when bound by VGAM284 RNA, herein designated VGAM RNA, causes inhibition of translation of respective one or more VGAM284 host target proteins.

[3939] It is further appreciated by one skilled in the art that the mode of translational inhibition illustrated by FIG. 1 with specific reference to translational inhibition exerted by VGAM284 gene, herein designated VGAM GENE, on one or more VGAM284 host target gene, herein designated VGAM HOST TARGET GENE, is in fact common to other known non-viral miRNA genes. As mentioned hereinabove with reference to the background section, although a specific complementary binding site has been demonstrated only for some of the known miRNA genes (primarily Lin-4 and Let-7), all other recently discovered miRNA genes are also believed by those skilled in the art to modulate expression of other genes by complementary binding, although specific complementary binding sites of these other miRNA genes have not yet been found (Ruvkun G., Perspective: Glimpses of a tiny RNA world, Science 294, 779 (2001)).

[3940] It is yet further appreciated that a function of VGAM284 is inhibition of expression of host target genes, as part of a novel viral mechanism of attacking a host. Accordingly, utilities of VGAM284 include diagnosis, prevention and treatment of viral infection by Vaccinia virus. Specific functions, and accordingly utilities, of VGAM284 correlate with, and may be deduced from, the identity of the host target genes which VGAM284 binds and inhibits, and the function of these host target genes, as elaborated hereinbelow.

[3941] Nucleotide sequences of the VGAM284 precursor RNA, herein designated VGAM PRECURSOR RNA, and of the diced VGAM284 RNA, herein designated VGAM RNA, and a schematic representation of the secondary folding of VGAM284 folded precursor RNA, herein designated VGAM FOLDED PRECURSOR RNA, of VGAM284 are further described hereinbelow with reference to Table 1.

[3942] Nucleotide sequences of host target binding sites, such as BINDING SITE-I, BINDING SITE-II and BINDING SITE-III of FIG. 1, found on, and schematic representation of the complementarity of each of these host target binding sites to VGAM284 RNA, herein designated VGAM RNA, are described hereinbelow with reference to Table 2.

[3943] FIG. 1 further provides a conceptual description of another novel bioinformatically detected viral gene of the present invention, referred to here as Viral Genomic Address Messenger 285 (VGAM285) viral gene, which modulates expression of respective host target genes thereof, the function and utility of which host target genes is known in the art.

[3944] VGAM285 is a novel bioinformatically detected regulatory, non protein coding, viral micro RNA (miRNA) gene. The method by which VGAM285 was detected is described hereinabove with reference to FIGS. 2-8.

[3945] VGAM285 gene, herein designated VGAM GENE, is a viral gene contained in the genome of Vaccinia virus. VGAM285 host target gene, herein designated VGAM HOST TARGET GENE, is a human gene contained in the human genome.

[3946] VGAM285 gene, herein designated VGAM GENE, encodes a VGAM285 precursor RNA, herein designated VGAM PRECURSOR RNA. Similar to other miRNA genes, and unlike most ordinary genes, VGAM285 precursor RNA, herein designated VGAM PRECURSOR RNA, does not encode a protein. A nucleotide sequence identical or highly similar to the nucleotide sequence of VGAM285 precursor RNA is designated SEQ ID:271, and is provided hereinbelow with reference to the sequence listing part. Nucleotide sequence SEQ ID:271 is located at position 163176 relative to the genome of Vaccinia virus.

[3947] VGAM285 precursor RNA, herein designated VGAM PRECURSOR RNA, folds onto itself, forming VGAM285 folded precursor RNA, herein designated VGAM FOLDED PRECURSOR RNA, which has a two-dimensional hairpin structure. As is well known in the art, this hairpin structure, is typical of RNA encoded by miRNA genes, and is due to the fact that the nucleotide sequence of the first half of the RNA encoded by a miRNA gene is an accurate or partial inversed-reversed sequence of the nucleotide sequence of the second half thereof.

[3948] An enzyme complex designated DICER COMPLEX, dices the VGAM285 folded precursor RNA, herein designated VGAM FOLDED PRECURSOR RNA, into VGAM285 RNA, herein designated VGAM RNA, a single stranded ˜22 nt long RNA segment. As is known in the art, dicing of a hairpin structured RNA precursor product into a short ˜22 nt RNA segment is catalyzed by an enzyme complex comprising an enzyme called Dicer together with other necessary proteins. A probable (over 86%) nucleotide sequence of VGAM285 RNA is designated SEQ ID:620, and is provided hereinbelow with reference to the sequence listing part.

[3949] VGAM285 host target gene, herein designated VGAM HOST TARGET GENE, encodes a corresponding messenger RNA, VGAM285 host target RNA, herein designated VGAM HOST TARGET RNA. VGAM285 host target RNA, herein designated VGAM HOST TARGET RNA, comprises three regions, as is typical of mRNA of a protein coding gene: a 5 untranslated region, a protein coding region and a 3 untranslated region, designated 5UTR, PROTEIN CODING and 3UTR respectively.

[3950] VGAM285 RNA, herein designated VGAM RNA, binds complementarily to one or more host target binding sites located in untranslated regions of VGAM285 host target RNA, herein designated VGAM HOST TARGET RNA. This complementary binding is due to the fact that the nucleotide sequence of VGAM285 RNA, herein designated VGAM RNA, is an accurate or a partial inversed-reversed sequence of the nucleotide sequence of each of the host target binding sites. As an illustration, FIG. 1 shows 3 such host target binding sites, designated BINDING SITE I, BINDING SITE II and BINDING SITE III respectively. It is appreciated that the number of host target binding sites shown in FIG. 1 is meant as an illustration only, and is not meant to be limiting VGAM285 RNA, herein designated VGAM RNA, may have a different number of host target binding sites in untranslated regions of a VGAM285 host target RNA, herein designated VGAM HOST TARGET RNA. It is further appreciated that while FIG. 1 depicts host target binding sites in the 3UTR region, this is meant as an example only these host target binding sites may be located in the 3UTR region, the 5UTR region, or in both 3UTR and 5UTR regions.

[3951] The complementary binding of VGAM285 RNA, herein designated VGAM RNA, to host target binding sites on VGAM285 host target RNA, herein designated VGAM HOST TARGET RNA, such as BINDING SITE I, BINDING SITE II and BINDING SITE III, inhibits translation of VGAM285 host target RNA, herein designated VGAM HOST TARGET RNA, into VGAM285 host target protein, herein designated VGAM HOST TARGET PROTEIN. VGAM host target protein is therefore outlined by a broken line.

[3952] It is appreciated that VGAM285 host target gene, herein designated VGAM HOST TARGET GENE, in fact represents a plurality of VGAM285 host target genes. The mRNA of each one of this plurality of VGAM285 host target genes comprises one or more host target binding sites, each having a nucleotide sequence which is at least partly complementary to VGAM285 RNA, herein designated VGAM RNA, and which when bound by VGAM285 RNA, herein designated VGAM RNA, causes inhibition of translation of respective one or more VGAM285 host target proteins.

[3953] It is further appreciated by one skilled in the art that the mode of translational inhibition illustrated by FIG. 1 with specific reference to translational inhibition exerted by VGAM285 gene, herein designated VGAM GENE, on one or more VGAM285 host target gene, herein designated VGAM HOST TARGET GENE, is in fact common to other known non-viral miRNA genes. As mentioned hereinabove with reference to the background section, although a specific complementary binding site has been demonstrated only for some of the known miRNA genes (primarily Lin-4 and Let-7), all other recently discovered miRNA genes are also believed by those skilled in the art to modulate expression of other genes by complementary binding, although specific complementary binding sites of these other miRNA genes have not yet been found (Ruvkun G., Perspective: Glimpses of a tiny RNA world, Science 294, 779 (2001)).

[3954] It is yet further appreciated that a function of VGAM285 is inhibition of expression of host target genes, as part of a novel viral mechanism of attacking a host. Accordingly, utilities of VGAM285 include diagnosis, prevention and treatment of viral infection by Vaccinia virus. Specific functions, and accordingly utilities, of VGAM285 correlate with, and may be deduced from, the identity of the host target genes which VGAM285 binds and inhibits, and the function of these host target genes, as elaborated hereinbelow.

[3955] Nucleotide sequences of the VGAM285 precursor RNA, herein designated VGAM PRECURSOR RNA, and of the diced VGAM285 RNA, herein designated VGAM RNA, and a schematic representation of the secondary folding of VGAM285 folded precursor RNA, herein designated VGAM FOLDED PRECURSOR RNA, of VGAM285 are further described hereinbelow with reference to Table 1.

[3956] Nucleotide sequences of host target binding sites, such as BINDING SITE-I, BINDING SITE-II and BINDING SITE-III of FIG. 1, found on, and schematic representation of the complementarity of each of these host target binding sites to VGAM285 RNA, herein designated VGAM RNA, are described hereinbelow with reference to Table 2.

[3957] FIG. 1 further provides a conceptual description of another novel bioinformatically detected viral gene of the present invention, referred to here as Viral Genomic Address Messenger 286 (VGAM286) viral gene, which modulates expression of respective host target genes thereof, the function and utility of which host target genes is known in the art.

[3958] VGAM286 is a novel bioinformatically detected regulatory, non protein coding, viral micro RNA (miRNA) gene. The method by which VGAM286 was detected is described hereinabove with reference to FIGS. 2-8.

[3959] VGAM286 gene, herein designated VGAM GENE, is a viral gene contained in the genome of Vaccinia virus. VGAM286 host target gene, herein designated VGAM HOST TARGET GENE, is a human gene contained in the human genome.

[3960] VGAM286 gene, herein designated VGAM GENE, encodes a VGAM286 precursor RNA, herein designated VGAM PRECURSOR RNA. Similar to other miRNA genes, and unlike most ordinary genes, VGAM286 precursor RNA, herein designated VGAM PRECURSOR RNA, does not encode a protein. A nucleotide sequence identical or highly similar to the nucleotide sequence of VGAM286 precursor RNA is designated SEQ ID:272, and is provided hereinbelow with reference to the sequence listing part. Nucleotide sequence SEQ ID:272 is located at position 163795 relative to the genome of Vaccinia virus.

[3961] VGAM286 precursor RNA, herein designated VGAM PRECURSOR RNA, folds onto itself, forming VGAM286 folded precursor RNA, herein designated VGAM FOLDED PRECURSOR RNA, which has a two-dimensional hairpin structure. As is well known in the art, this hairpin structure, is typical of RNA encoded by miRNA genes, and is due to the fact that the nucleotide sequence of the first half of the RNA encoded by a miRNA gene is an accurate or partial inversed-reversed sequence of the nucleotide sequence of the second half thereof.

[3962] An enzyme complex designated DICER COMPLEX, dices the VGAM286 folded precursor RNA, herein designated VGAM FOLDED PRECURSOR RNA, into VGAM286 RNA, herein designated VGAM RNA, a single stranded ˜22 nt long RNA segment. As is known in the art, dicing of a hairpin structured RNA precursor product into a short ˜22 nt RNA segment is catalyzed by an enzyme complex comprising an enzyme called Dicer together with other necessary proteins. A probable (over 73%) nucleotide sequence of VGAM286 RNA is designated SEQ ID:621, and is provided hereinbelow with reference to the sequence listing part.

[3963] VGAM286 host target gene, herein designated VGAM HOST TARGET GENE, encodes a corresponding messenger RNA, VGAM286 host target RNA, herein designated VGAM HOST TARGET RNA. VGAM286 host target RNA, herein designated VGAM HOST TARGET RNA, comprises three regions, as is typical of mRNA of a protein coding gene: a 5 untranslated region, a protein coding region and a 3 untranslated region, designated 5UTR, PROTEIN CODING and 3UTR respectively.

[3964] VGAM286 RNA, herein designated VGAM RNA, binds complementarily to one or more host target binding sites located in untranslated regions of VGAM286 host target RNA, herein designated VGAM HOST TARGET RNA. This complementary binding is due to the fact that the nucleotide sequence of VGAM286 RNA, herein designated VGAM RNA, is an accurate or a partial inversed-reversed sequence of the nucleotide sequence of each of the host target binding sites. As an illustration, FIG. 1 shows 3 such host target binding sites, designated BINDING SITE I, BINDING SITE II and BINDING SITE III respectively. It is appreciated that the number of host target binding sites shown in FIG. 1 is meant as an illustration only, and is not meant to be limiting VGAM286 RNA, herein designated VGAM RNA, may have a different number of host target binding sites in untranslated regions of a VGAM286 host target RNA, herein designated VGAM HOST TARGET RNA. It is further appreciated that while FIG. 1 depicts host target binding sites in the 3UTR region, this is meant as an example only these host target binding sites may be located in the 3UTR region, the 5UTR region, or in both 3UTR and 5UTR regions.

[3965] The complementary binding of VGAM286 RNA, herein designated VGAM RNA, to host target binding sites on VGAM286 host target RNA, herein designated VGAM HOST TARGET RNA, such as BINDING SITE I, BINDING SITE II and BINDING SITE III, inhibits translation of VGAM286 host target RNA, herein designated VGAM HOST TARGET RNA, into VGAM286 host target protein, herein designated VGAM HOST TARGET PROTEIN. VGAM host target protein is therefore outlined by a broken line.

[3966] It is appreciated that VGAM286 host target gene, herein designated VGAM HOST TARGET GENE, in fact represents a plurality of VGAM286 host target genes. The mRNA of each one of this plurality of VGAM286 host target genes comprises one or more host target binding sites, each having a nucleotide sequence which is at least partly complementary to VGAM286 RNA, herein designated VGAM RNA, and which when bound by VGAM286 RNA, herein designated VGAM RNA, causes inhibition of translation of respective one or more VGAM286 host target proteins.

[3967] It is further appreciated by one skilled in the art that the mode of translational inhibition illustrated by FIG. 1 with specific reference to translational inhibition exerted by VGAM286 gene, herein designated VGAM GENE, on one or more VGAM286 host target gene, herein designated VGAM HOST TARGET GENE, is in fact common to other known non-viral miRNA genes. As mentioned hereinabove with reference to the background section, although a specific complementary binding site has been demonstrated only for some of the known miRNA genes (primarily Lin-4 and Let-7), all other recently discovered miRNA genes are also believed by those skilled in the art to modulate expression of other genes by complementary binding, although specific complementary binding sites of these other miRNA genes have not yet been found (Ruvkun G., Perspective: Glimpses of a tiny RNA world, Science 294, 779 (2001)).

[3968] It is yet further appreciated that a function of VGAM286 is inhibition of expression of host target genes, as part of a novel viral mechanism of attacking a host. Accordingly, utilities of VGAM286 include diagnosis, prevention and treatment of viral infection by Vaccinia virus. Specific functions, and accordingly utilities, of VGAM286 correlate with, and may be deduced from, the identity of the host target genes which VGAM286 binds and inhibits, and the function of these host target genes, as elaborated hereinbelow.

[3969] Nucleotide sequences of the VGAM286 precursor RNA, herein designated VGAM PRECURSOR RNA, and of the diced VGAM286 RNA, herein designated VGAM RNA, and a schematic representation of the secondary folding of VGAM286 folded precursor RNA, herein designated VGAM FOLDED PRECURSOR RNA, of VGAM286 are further described hereinbelow with reference to Table 1.

[3970] Nucleotide sequences of host target binding sites, such as BINDING SITE-I, BINDING SITE-II and BINDING SITE-III of FIG. 1, found on, and schematic representation of the complementarity of each of these host target binding sites to VGAM286 RNA, herein designated VGAM RNA, are described hereinbelow with reference to Table 2.

[3971] FIG. 1 further provides a conceptual description of another novel bioinformatically detected viral gene of the present invention, referred to here as Viral Genomic Address Messenger 287 (VGAM287) viral gene, which modulates expression of respective host target genes thereof, the function and utility of which host target genes is known in the art.

[3972] VGAM287 is a novel bioinformatically detected regulatory, non protein coding, viral micro RNA (miRNA) gene. The method by which VGAM287 was detected is described hereinabove with reference to FIGS. 2-8.

[3973] VGAM287 gene, herein designated VGAM GENE, is a viral gene contained in the genome of Vaccinia virus. VGAM287 host target gene, herein designated VGAM HOST TARGET GENE, is a human gene contained in the human genome.

[3974] VGAM287 gene, herein designated VGAM GENE, encodes a VGAM287 precursor RNA, herein designated VGAM PRECURSOR RNA. Similar to other miRNA genes, and unlike most ordinary genes, VGAM287 precursor RNA, herein designated VGAM PRECURSOR RNA, does not encode a protein. A nucleotide sequence identical or highly similar to the nucleotide sequence of VGAM287 precursor RNA is designated SEQ ID:273, and is provided hereinbelow with reference to the sequence listing part. Nucleotide sequence SEQ ID:273 is located at position 163852 relative to the genome of Vaccinia virus.

[3975] VGAM287 precursor RNA, herein designated VGAM PRECURSOR RNA, folds onto itself, forming VGAM287 folded precursor RNA, herein designated VGAM FOLDED PRECURSOR RNA, which has a two-dimensional hairpin structure. As is well known in the art, this hairpin structure, is typical of RNA encoded by miRNA genes, and is due to the fact that the nucleotide sequence of the first half of the RNA encoded by a miRNA gene is an accurate or partial inversed-reversed sequence of the nucleotide sequence of the second half thereof.

[3976] An enzyme complex designated DICER COMPLEX, dices the VGAM287 folded precursor RNA, herein designated VGAM FOLDED PRECURSOR RNA, into VGAM287 RNA, herein designated VGAM RNA, a single stranded ˜22 nt long RNA segment. As is known in the art, dicing of a hairpin structured RNA precursor product into a short ˜22 nt RNA segment is catalyzed by an enzyme complex comprising an enzyme called Dicer together with other necessary proteins. A probable (over 73%) nucleotide sequence of VGAM287 RNA is designated SEQ ID:622, and is provided hereinbelow with reference to the sequence listing part.

[3977] VGAM287 host target gene, herein designated VGAM HOST TARGET GENE, encodes a corresponding messenger RNA, VGAM287 host target RNA, herein designated VGAM HOST TARGET RNA. VGAM287 host target RNA, herein designated VGAM HOST TARGET RNA, comprises three regions, as is typical of mRNA of a protein coding gene: a 5 untranslated region, a protein coding region and a 3 untranslated region, designated 5UTR, PROTEIN CODING and 3UTR respectively.

[3978] VGAM287 RNA, herein designated VGAM RNA, binds complementarily to one or more host target binding sites located in untranslated regions of VGAM287 host target RNA, herein designated VGAM HOST TARGET RNA. This complementary binding is due to the fact that the nucleotide sequence of VGAM287 RNA, herein designated VGAM RNA, is an accurate or a partial inversed-reversed sequence of the nucleotide sequence of each of the host target binding sites. As an illustration, FIG. 1 shows 3 such host target binding sites, designated BINDING SITE I, BINDING SITE II and BINDING SITE III respectively. It is appreciated that the number of host target binding sites shown in FIG. 1 is meant as an illustration only, and is not meant to be limiting VGAM287 RNA, herein designated VGAM RNA, may have a different number of host target binding sites in untranslated regions of a VGAM287 host target RNA, herein designated VGAM HOST TARGET RNA. It is further appreciated that while FIG. 1 depicts host target binding sites in the 3UTR region, this is meant as an example only these host target binding sites may be located in the 3UTR region, the 5UTR region, or in both 3UTR and 5UTR regions.

[3979] The complementary binding of VGAM287 RNA, herein designated VGAM RNA, to host target binding sites on VGAM287 host target RNA, herein designated VGAM HOST TARGET RNA, such as BINDING SITE I, BINDING SITE II and BINDING SITE III, inhibits translation of VGAM287 host target RNA, herein designated VGAM HOST TARGET RNA, into VGAM287 host target protein, herein designated VGAM HOST TARGET PROTEIN. VGAM host target protein is therefore outlined by a broken line.

[3980] It is appreciated that VGAM287 host target gene, herein designated VGAM HOST TARGET GENE, in fact represents a plurality of VGAM287 host target genes. The mRNA of each one of this plurality of VGAM287 host target genes comprises one or more host target binding sites, each having a nucleotide sequence which is at least partly complementary to VGAM287 RNA, herein designated VGAM RNA, and which when bound by VGAM287 RNA, herein designated VGAM RNA, causes inhibition of translation of respective one or more VGAM287 host target proteins.

[3981] It is further appreciated by one skilled in the art that the mode of translational inhibition illustrated by FIG. 1 with specific reference to translational inhibition exerted by VGAM287 gene, herein designated VGAM GENE, on one or more VGAM287 host target gene, herein designated VGAM HOST TARGET GENE, is in fact common to other known non-viral miRNA genes. As mentioned hereinabove with reference to the background section, although a specific complementary binding site has been demonstrated only for some of the known miRNA genes (primarily Lin-4 and Let-7), all other recently discovered miRNA genes are also believed by those skilled in the art to modulate expression of other genes by complementary binding, although specific complementary binding sites of these other miRNA genes have not yet been found (Ruvkun G., Perspective: Glimpses of a tiny RNA world, Science 294, 779 (2001)).

[3982] It is yet further appreciated that a function of VGAM287 is inhibition of expression of host target genes, as part of a novel viral mechanism of attacking a host. Accordingly, utilities of VGAM287 include diagnosis, prevention and treatment of viral infection by Vaccinia virus. Specific functions, and accordingly utilities, of VGAM287 correlate with, and may be deduced from, the identity of the host target genes which VGAM287 binds and inhibits, and the function of these host target genes, as elaborated hereinbelow.

[3983] Nucleotide sequences of the VGAM287 precursor RNA, herein designated VGAM PRECURSOR RNA, and of the diced VGAM287 RNA, herein designated VGAM RNA, and a schematic representation of the secondary folding of VGAM287 folded precursor RNA, herein designated VGAM FOLDED PRECURSOR RNA, of VGAM287 are further described hereinbelow with reference to Table 1.

[3984] Nucleotide sequences of host target binding sites, such as BINDING SITE-I, BINDING SITE-II and BINDING SITE-III of FIG. 1, found on, and schematic representation of the complementarity of each of these host target binding sites to VGAM287 RNA, herein designated VGAM RNA, are described hereinbelow with reference to Table 2.

[3985] FIG. 1 further provides a conceptual description of another novel bioinformatically detected viral gene of the present invention, referred to here as Viral Genomic Address Messenger 288 (VGAM288) viral gene, which modulates expression of respective host target genes thereof, the function and utility of which host target genes is known in the art.

[3986] VGAM288 is a novel bioinformatically detected regulatory, non protein coding, viral micro RNA (miRNA) gene. The method by which VGAM288 was detected is described hereinabove with reference to FIGS. 2-8.

[3987] VGAM288 gene, herein designated VGAM GENE, is a viral gene contained in the genome of Vaccinia virus. VGAM288 host target gene, herein designated VGAM HOST TARGET GENE, is a human gene contained in the human genome.

[3988] VGAM288 gene, herein designated VGAM GENE, encodes a VGAM288 precursor RNA, herein designated VGAM PRECURSOR RNA. Similar to other miRNA genes, and unlike most ordinary genes, VGAM288 precursor RNA, herein designated VGAM PRECURSOR RNA, does not encode a protein. A nucleotide sequence identical or highly similar to the nucleotide sequence of VGAM288 precursor RNA is designated SEQ ID:274, and is provided hereinbelow with reference to the sequence listing part. Nucleotide sequence SEQ ID:274 is located at position 166608 relative to the genome of Vaccinia virus.

[3989] VGAM288 precursor RNA, herein designated VGAM PRECURSOR RNA, folds onto itself, forming VGAM288 folded precursor RNA, herein designated VGAM FOLDED PRECURSOR RNA, which has a two-dimensional hairpin structure. As is well known in the art, this hairpin structure, is typical of RNA encoded by miRNA genes, and is due to the fact that the nucleotide sequence of the first half of the RNA encoded by a miRNA gene is an accurate or partial inversed-reversed sequence of the nucleotide sequence of the second half thereof.

[3990] An enzyme complex designated DICER COMPLEX, dices the VGAM288 folded precursor RNA, herein designated VGAM FOLDED PRECURSOR RNA, into VGAM288 RNA, herein designated VGAM RNA, a single stranded ˜22 nt long RNA segment. As is known in the art, dicing of a hairpin structured RNA precursor product into a short ˜22 nt RNA segment is catalyzed by an enzyme complex comprising an enzyme called Dicer together with other necessary proteins. A probable (over 82%) nucleotide sequence of VGAM288 RNA is designated SEQ ID:623, and is provided hereinbelow with reference to the sequence listing part.

[3991] VGAM288 host target gene, herein designated VGAM HOST TARGET GENE, encodes a corresponding messenger RNA, VGAM288 host target RNA, herein designated VGAM HOST TARGET RNA. VGAM288 host target RNA, herein designated VGAM HOST TARGET RNA, comprises three regions, as is typical of mRNA of a protein coding gene: a 5 untranslated region, a protein coding region and a 3 untranslated region, designated 5UTR, PROTEIN CODING and 3UTR respectively.

[3992] VGAM288 RNA, herein designated VGAM RNA, binds complementarily to one or more host target binding sites located in untranslated regions of VGAM288 host target RNA, herein designated VGAM HOST TARGET RNA. This complementary binding is due to the fact that the nucleotide sequence of VGAM288 RNA, herein designated VGAM RNA, is an accurate or a partial inversed-reversed sequence of the nucleotide sequence of each of the host target binding sites. As an illustration, FIG. 1 shows 3 such host target binding sites, designated BINDING SITE I, BINDING SITE II and BINDING SITE III respectively. It is appreciated that the number of host target binding sites shown in FIG. 1 is meant as an illustration only, and is not meant to be limiting VGAM288 RNA, herein designated VGAM RNA, may have a different number of host target binding sites in untranslated regions of a VGAM288 host target RNA, herein designated VGAM HOST TARGET RNA. It is further appreciated that while FIG. 1 depicts host target binding sites in the 3UTR region, this is meant as an example only these host target binding sites may be located in the 3UTR region, the 5UTR region, or in both 3UTR and 5UTR regions.

[3993] The complementary binding of VGAM288 RNA, herein designated VGAM RNA, to host target binding sites on VGAM288 host target RNA, herein designated VGAM HOST TARGET RNA, such as BINDING SITE I, BINDING SITE II and BINDING SITE III, inhibits translation of VGAM288 host target RNA, herein designated VGAM HOST TARGET RNA, into VGAM288 host target protein, herein designated VGAM HOST TARGET PROTEIN. VGAM host target protein is therefore outlined by a broken line.

[3994] It is appreciated that VGAM288 host target gene, herein designated VGAM HOST TARGET GENE, in fact represents a plurality of VGAM288 host target genes. The mRNA of each one of this plurality of VGAM288 host target genes comprises one or more host target binding sites, each having a nucleotide sequence which is at least partly complementary to VGAM288 RNA, herein designated VGAM RNA, and which when bound by VGAM288 RNA, herein designated VGAM RNA, causes inhibition of translation of respective one or more VGAM288 host target proteins.

[3995] It is further appreciated by one skilled in the art that the mode of translational inhibition illustrated by FIG. 1 with specific reference to translational inhibition exerted by VGAM288 gene, herein designated VGAM GENE, on one or more VGAM288 host target gene, herein designated VGAM HOST TARGET GENE, is in fact common to other known non-viral miRNA genes. As mentioned hereinabove with reference to the background section, although a specific complementary binding site has been demonstrated only for some of the known miRNA genes (primarily Lin-4 and Let-7), all other recently discovered miRNA genes are also believed by those skilled in the art to modulate expression of other genes by complementary binding, although specific complementary binding sites of these other miRNA genes have not yet been found (Ruvkun G., Perspective: Glimpses of a tiny RNA world, Science 294, 779 (2001)).

[3996] It is yet further appreciated that a function of VGAM288 is inhibition of expression of host target genes, as part of a novel viral mechanism of attacking a host. Accordingly, utilities of VGAM288 include diagnosis, prevention and treatment of viral infection by Vaccinia virus. Specific functions, and accordingly utilities, of VGAM288 correlate with, and may be deduced from, the identity of the host target genes which VGAM288 binds and inhibits, and the function of these host target genes, as elaborated hereinbelow.

[3997] Nucleotide sequences of the VGAM288 precursor RNA, herein designated VGAM PRECURSOR RNA, and of the diced VGAM288 RNA, herein designated VGAM RNA, and a schematic representation of the secondary folding of VGAM288 folded precursor RNA, herein designated VGAM FOLDED PRECURSOR RNA, of VGAM288 are further described hereinbelow with reference to Table 1.

[3998] Nucleotide sequences of host target binding sites, such as BINDING SITE-I, BINDING SITE-II and BINDING SITE-III of FIG. 1, found on, and schematic representation of the complementarity of each of these host target binding sites to VGAM288 RNA, herein designated VGAM RNA, are described hereinbelow with reference to Table 2.

[3999] FIG. 1 further provides a conceptual description of another novel bioinformatically detected viral gene of the present invention, referred to here as Viral Genomic Address Messenger 289 (VGAM289) viral gene, which modulates expression of respective host target genes thereof, the function and utility of which host target genes is known in the art.

[4000] VGAM289 is a novel bioinformatically detected regulatory, non protein coding, viral micro RNA (miRNA) gene. The method by which VGAM289 was detected is described hereinabove with reference to FIGS. 2-8.

[4001] VGAM289 gene, herein designated VGAM GENE, is a viral gene contained in the genome of Vaccinia virus. VGAM289 host target gene, herein designated VGAM HOST TARGET GENE, is a human gene contained in the human genome.

[4002] VGAM289 gene, herein designated VGAM GENE, encodes a VGAM289 precursor RNA, herein designated VGAM PRECURSOR RNA. Similar to other miRNA genes, and unlike most ordinary genes, VGAM289 precursor RNA, herein designated VGAM PRECURSOR RNA, does not encode a protein. A nucleotide sequence identical or highly similar to the nucleotide sequence of VGAM289 precursor RNA is designated SEQ ID:275, and is provided hereinbelow with reference to the sequence listing part. Nucleotide sequence SEQ ID:275 is located at position 168231 relative to the genome of Vaccinia virus.

[4003] VGAM289 precursor RNA, herein designated VGAM PRECURSOR RNA, folds onto itself, forming VGAM289 folded precursor RNA, herein designated VGAM FOLDED PRECURSOR RNA, which has a two-dimensional hairpin structure. As is well known in the art, this hairpin structure, is typical of RNA encoded by miRNA genes, and is due to the fact that the nucleotide sequence of the first half of the RNA encoded by a miRNA gene is an accurate or partial inversed-reversed sequence of the nucleotide sequence of the second half thereof.

[4004] An enzyme complex designated DICER COMPLEX, dices the VGAM289 folded precursor RNA, herein designated VGAM FOLDED PRECURSOR RNA, into VGAM289 RNA, herein designated VGAM RNA, a single stranded ˜22 nt long RNA segment. As is known in the art, dicing of a hairpin structured RNA precursor product into a short ˜22 nt RNA segment is catalyzed by an enzyme complex comprising an enzyme called Dicer together with other necessary proteins. A probable (over 87%) nucleotide sequence of VGAM289 RNA is designated SEQ ID:624, and is provided hereinbelow with reference to the sequence listing part.

[4005] VGAM289 host target gene, herein designated VGAM HOST TARGET GENE, encodes a corresponding messenger RNA, VGAM289 host target RNA, herein designated VGAM HOST TARGET RNA. VGAM289 host target RNA, herein designated VGAM HOST TARGET RNA, comprises three regions, as is typical of mRNA of a protein coding gene: a 5 untranslated region, a protein coding region and a 3 untranslated region, designated 5UTR, PROTEIN CODING and 3UTR respectively.

[4006] VGAM289 RNA, herein designated VGAM RNA, binds complementarily to one or more host target binding sites located in untranslated regions of VGAM289 host target RNA, herein designated VGAM HOST TARGET RNA. This complementary binding is due to the fact that the nucleotide sequence of VGAM289 RNA, herein designated VGAM RNA, is an accurate or a partial inversed-reversed sequence of the nucleotide sequence of each of the host target binding sites. As an illustration, FIG. 1 shows 3 such host target binding sites, designated BINDING SITE I, BINDING SITE II and BINDING SITE III respectively. It is appreciated that the number of host target binding sites shown in FIG. 1 is meant as an illustration only, and is not meant to be limiting VGAM289 RNA, herein designated VGAM RNA, may have a different number of host target binding sites in untranslated regions of a VGAM289 host target RNA, herein designated VGAM HOST TARGET RNA. It is further appreciated that while FIG. 1 depicts host target binding sites in the 3UTR region, this is meant as an example only these host target binding sites may be located in the 3UTR region, the 5UTR region, or in both 3UTR and 5UTR regions.

[4007] The complementary binding of VGAM289 RNA, herein designated VGAM RNA, to host target binding sites on VGAM289 host target RNA, herein designated VGAM HOST TARGET RNA, such as BINDING SITE I, BINDING SITE II and BINDING SITE III, inhibits translation of VGAM289 host target RNA, herein designated VGAM HOST TARGET RNA, into VGAM289 host target protein, herein designated VGAM HOST TARGET PROTEIN. VGAM host target protein is therefore outlined by a broken line.

[4008] It is appreciated that VGAM289 host target gene, herein designated VGAM HOST TARGET GENE, in fact represents a plurality of VGAM289 host target genes. The mRNA of each one of this plurality of VGAM289 host target genes comprises one or more host target binding sites, each having a nucleotide sequence which is at least partly complementary to VGAM289 RNA, herein designated VGAM RNA, and which when bound by VGAM289 RNA, herein designated VGAM RNA, causes inhibition of translation of respective one or more VGAM289 host target proteins.

[4009] It is further appreciated by one skilled in the art that the mode of translational inhibition illustrated by FIG. 1 with specific reference to translational inhibition exerted by VGAM289 gene, herein designated VGAM GENE, on one or more VGAM289 host target gene, herein designated VGAM HOST TARGET GENE, is in fact common to other known non-viral miRNA genes. As mentioned hereinabove with reference to the background section, although a specific complementary binding site has been demonstrated only for some of the known miRNA genes (primarily Lin-4 and Let-7), all other recently discovered miRNA genes are also believed by those skilled in the art to modulate expression of other genes by complementary binding, although specific complementary binding sites of these other miRNA genes have not yet been found (Ruvkun G., Perspective: Glimpses of a tiny RNA world, Science 294, 779 (2001)).

[4010] It is yet further appreciated that a function of VGAM289 is inhibition of expression of host target genes, as part of a novel viral mechanism of attacking a host. Accordingly, utilities of VGAM289 include diagnosis, prevention and treatment of viral infection by Vaccinia virus. Specific functions, and accordingly utilities, of VGAM289 correlate with, and may be deduced from, the identity of the host target genes which VGAM289 binds and inhibits, and the function of these host target genes, as elaborated hereinbelow.

[4011] Nucleotide sequences of the VGAM289 precursor RNA, herein designated VGAM PRECURSOR RNA, and of the diced VGAM289 RNA, herein designated VGAM RNA, and a schematic representation of the secondary folding of VGAM289 folded precursor RNA, herein designated VGAM FOLDED PRECURSOR RNA, of VGAM289 are further described hereinbelow with reference to Table 1.

[4012] Nucleotide sequences of host target binding sites, such as BINDING SITE-I, BINDING SITE-II and BINDING SITE-III of FIG. 1, found on, and schematic representation of the complementarity of each of these host target binding sites to VGAM289 RNA, herein designated VGAM RNA, are described hereinbelow with reference to Table 2.

[4013] FIG. 1 further provides a conceptual description of another novel bioinformatically detected viral gene of the present invention, referred to here as Viral Genomic Address Messenger 290 (VGAM290) viral gene, which modulates expression of respective host target genes thereof, the function and utility of which host target genes is known in the art.

[4014] VGAM290 is a novel bioinformatically detected regulatory, non protein coding, viral micro RNA (miRNA) gene. The method by which VGAM290 was detected is described hereinabove with reference to FIGS. 2-8.

[4015] VGAM290 gene, herein designated VGAM GENE, is a viral gene contained in the genome of Vaccinia virus. VGAM290 host target gene, herein designated VGAM HOST TARGET GENE, is a human gene contained in the human genome.

[4016] VGAM290 gene, herein designated VGAM GENE, encodes a VGAM290 precursor RNA, herein designated VGAM PRECURSOR RNA. Similar to other miRNA genes, and unlike most ordinary genes, VGAM290 precursor RNA, herein designated VGAM PRECURSOR RNA, does not encode a protein. A nucleotide sequence identical or highly similar to the nucleotide sequence of VGAM290 precursor RNA is designated SEQ ID:276, and is provided hereinbelow with reference to the sequence listing part. Nucleotide sequence SEQ ID:276 is located at position 166723 relative to the genome of Vaccinia virus.

[4017] VGAM290 precursor RNA, herein designated VGAM PRECURSOR RNA, folds onto itself, forming VGAM290 folded precursor RNA, herein designated VGAM FOLDED PRECURSOR RNA, which has a two-dimensional hairpin structure. As is well known in the art, this hairpin structure, is typical of RNA encoded by miRNA genes, and is due to the fact that the nucleotide sequence of the first half of the RNA encoded by a miRNA gene is an accurate or partial inversed-reversed sequence of the nucleotide sequence of the second half thereof.

[4018] An enzyme complex designated DICER COMPLEX, dices the VGAM290 folded precursor RNA, herein designated VGAM FOLDED PRECURSOR RNA, into VGAM290 RNA, herein designated VGAM RNA, a single stranded ˜22 nt long RNA segment. As is known in the art, dicing of a hairpin structured RNA precursor product into a short ˜22 nt RNA segment is catalyzed by an enzyme complex comprising an enzyme called Dicer together with other necessary proteins. A probable (over 75%) nucleotide sequence of VGAM290 RNA is designated SEQ ID:625, and is provided hereinbelow with reference to the sequence listing part.

[4019] VGAM290 host target gene, herein designated VGAM HOST TARGET GENE, encodes a corresponding messenger RNA, VGAM290 host target RNA, herein designated VGAM HOST TARGET RNA. VGAM290 host target RNA, herein designated VGAM HOST TARGET RNA, comprises three regions, as is typical of mRNA of a protein coding gene: a 5 untranslated region, a protein coding region and a 3 untranslated region, designated 5UTR, PROTEIN CODING and 3UTR respectively.

[4020] VGAM290 RNA, herein designated VGAM RNA, binds complementarily to one or more host target binding sites located in untranslated regions of VGAM290 host target RNA, herein designated VGAM HOST TARGET RNA. This complementary binding is due to the fact that the nucleotide sequence of VGAM290 RNA, herein designated VGAM RNA, is an accurate or a partial inversed-reversed sequence of the nucleotide sequence of each of the host target binding sites. As an illustration, FIG. 1 shows 3 such host target binding sites, designated BINDING SITE I, BINDING SITE II and BINDING SITE III respectively. It is appreciated that the number of host target binding sites shown in FIG. 1 is meant as an illustration only, and is not meant to be limiting VGAM290 RNA, herein designated VGAM RNA, may have a different number of host target binding sites in untranslated regions of a VGAM290 host target RNA, herein designated VGAM HOST TARGET RNA. It is further appreciated that while FIG. 1 depicts host target binding sites in the 3UTR region, this is meant as an example only these host target binding sites may be located in the 3UTR region, the 5UTR region, or in both 3UTR and 5UTR regions.

[4021] The complementary binding of VGAM290 RNA, herein designated VGAM RNA, to host target binding sites on VGAM290 host target RNA, herein designated VGAM HOST TARGET RNA, such as BINDING SITE I, BINDING SITE II and BINDING SITE III, inhibits translation of VGAM290 host target RNA, herein designated VGAM HOST TARGET RNA, into VGAM290 host target protein, herein designated VGAM HOST TARGET PROTEIN. VGAM host target protein is therefore outlined by a broken line.

[4022] It is appreciated that VGAM290 host target gene, herein designated VGAM HOST TARGET GENE, in fact represents a plurality of VGAM290 host target genes. The mRNA of each one of this plurality of VGAM290 host target genes comprises one or more host target binding sites, each having a nucleotide sequence which is at least partly complementary to VGAM290 RNA, herein designated VGAM RNA, and which when bound by VGAM290 RNA, herein designated VGAM RNA, causes inhibition of translation of respective one or more VGAM290 host target proteins.

[4023] It is further appreciated by one skilled in the art that the mode of translational inhibition illustrated by FIG. 1 with specific reference to translational inhibition exerted by VGAM290 gene, herein designated VGAM GENE, on one or more VGAM290 host target gene, herein designated VGAM HOST TARGET GENE, is in fact common to other known non-viral miRNA genes. As mentioned hereinabove with reference to the background section, although a specific complementary binding site has been demonstrated only for some of the known miRNA genes (primarily Lin-4 and Let-7), all other recently discovered miRNA genes are also believed by those skilled in the art to modulate expression of other genes by complementary binding, although specific complementary binding sites of these other miRNA genes have not yet been found (Ruvkun G., Perspective: Glimpses of a tiny RNA world, Science 294, 779 (2001)).

[4024] It is yet further appreciated that a function of VGAM290 is inhibition of expression of host target genes, as part of a novel viral mechanism of attacking a host. Accordingly, utilities of VGAM290 include diagnosis, prevention and treatment of viral infection by Vaccinia virus. Specific functions, and accordingly utilities, of VGAM290 correlate with, and may be deduced from, the identity of the host target genes which VGAM290 binds and inhibits, and the function of these host target genes, as elaborated hereinbelow.

[4025] Nucleotide sequences of the VGAM290 precursor RNA, herein designated VGAM PRECURSOR RNA, and of the diced VGAM290 RNA, herein designated VGAM RNA, and a schematic representation of the secondary folding of VGAM290 folded precursor RNA, herein designated VGAM FOLDED PRECURSOR RNA, of VGAM290 are further described hereinbelow with reference to Table 1.

[4026] Nucleotide sequences of host target binding sites, such as BINDING SITE-I, BINDING SITE-II and BINDING SITE-III of FIG. 1, found on, and schematic representation of the complementarity of each of these host target binding sites to VGAM290 RNA, herein designated VGAM RNA, are described hereinbelow with reference to Table 2.

[4027] FIG. 1 further provides a conceptual description of another novel bioinformatically detected viral gene of the present invention, referred to here as Viral Genomic Address Messenger 291 (VGAM291) viral gene, which modulates expression of respective host target genes thereof, the function and utility of which host target genes is known in the art.

[4028] VGAM291 is a novel bioinformatically detected regulatory, non protein coding, viral micro RNA (miRNA) gene. The method by which VGAM291 was detected is described hereinabove with reference to FIGS. 2-8.

[4029] VGAM291 gene, herein designated VGAM GENE, is a viral gene contained in the genome of Vaccinia virus. VGAM291 host target gene, herein designated VGAM HOST TARGET GENE, is a human gene contained in the human genome.

[4030] VGAM291 gene, herein designated VGAM GENE, encodes a VGAM291 precursor RNA, herein designated VGAM PRECURSOR RNA. Similar to other miRNA genes, and unlike most ordinary genes, VGAM291 precursor RNA, herein designated VGAM PRECURSOR RNA, does not encode a protein. A nucleotide sequence identical or highly similar to the nucleotide sequence of VGAM291 precursor RNA is designated SEQ ID:277, and is provided hereinbelow with reference to the sequence listing part. Nucleotide sequence SEQ ID:277 is located at position 165333 relative to the genome of Vaccinia virus.

[4031] VGAM291 precursor RNA, herein designated VGAM PRECURSOR RNA, folds onto itself, forming VGAM291 folded precursor RNA, herein designated VGAM FOLDED PRECURSOR RNA, which has a two-dimensional hairpin structure. As is well known in the art, this hairpin structure, is typical of RNA encoded by miRNA genes, and is due to the fact that the nucleotide sequence of the first half of the RNA encoded by a miRNA gene is an accurate or partial inversed-reversed sequence of the nucleotide sequence of the second half thereof.

[4032] An enzyme complex designated DICER COMPLEX, dices the VGAM291 folded precursor RNA, herein designated VGAM FOLDED PRECURSOR RNA, into VGAM291 RNA, herein designated VGAM RNA, a single stranded ˜22 nt long RNA segment. As is known in the art, dicing of a hairpin structured RNA precursor product into a short ˜22 nt RNA segment is catalyzed by an enzyme complex comprising an enzyme called Dicer together with other necessary proteins. A probable (over 79%) nucleotide sequence of VGAM291 RNA is designated SEQ ID:626, and is provided hereinbelow with reference to the sequence listing part.

[4033] VGAM291 host target gene, herein designated VGAM HOST TARGET GENE, encodes a corresponding messenger RNA, VGAM291 host target RNA, herein designated VGAM HOST TARGET RNA. VGAM291 host target RNA, herein designated VGAM HOST TARGET RNA, comprises three regions, as is typical of mRNA of a protein coding gene: a 5 untranslated region, a protein coding region and a 3 untranslated region, designated 5UTR, PROTEIN CODING and 3UTR respectively.

[4034] VGAM291 RNA, herein designated VGAM RNA, binds complementarily to one or more host target binding sites located in untranslated regions of VGAM291 host target RNA, herein designated VGAM HOST TARGET RNA. This complementary binding is due to the fact that the nucleotide sequence of VGAM291 RNA, herein designated VGAM RNA, is an accurate or a partial inversed-reversed sequence of the nucleotide sequence of each of the host target binding sites. As an illustration, FIG. 1 shows 3 such host target binding sites, designated BINDING SITE I, BINDING SITE II and BINDING SITE III respectively. It is appreciated that the number of host target binding sites shown in FIG. 1 is meant as an illustration only, and is not meant to be limiting VGAM291 RNA, herein designated VGAM RNA, may have a different number of host target binding sites in untranslated regions of a VGAM291 host target RNA, herein designated VGAM HOST TARGET RNA. It is further appreciated that while FIG. 1 depicts host target binding sites in the 3UTR region, this is meant as an example only these host target binding sites may be located in the 3UTR region, the 5UTR region, or in both 3UTR and 5UTR regions.

[4035] The complementary binding of VGAM291 RNA, herein designated VGAM RNA, to host target binding sites on VGAM291 host target RNA, herein designated VGAM HOST TARGET RNA, such as BINDING SITE I, BINDING SITE II and BINDING SITE III, inhibits translation of VGAM291 host target RNA, herein designated VGAM HOST TARGET RNA, into VGAM291 host target protein, herein designated VGAM HOST TARGET PROTEIN. VGAM host target protein is therefore outlined by a broken line.

[4036] It is appreciated that VGAM291 host target gene, herein designated VGAM HOST TARGET GENE, in fact represents a plurality of VGAM291 host target genes. The mRNA of each one of this plurality of VGAM291 host target genes comprises one or more host target binding sites, each having a nucleotide sequence which is at least partly complementary to VGAM291 RNA, herein designated VGAM RNA, and which when bound by VGAM291 RNA, herein designated VGAM RNA, causes inhibition of translation of respective one or more VGAM291 host target proteins.

[4037] It is further appreciated by one skilled in the art that the mode of translational inhibition illustrated by FIG. 1 with specific reference to translational inhibition exerted by VGAM291 gene, herein designated VGAM GENE, on one or more VGAM291 host target gene, herein designated VGAM HOST TARGET GENE, is in fact common to other known non-viral miRNA genes. As mentioned hereinabove with reference to the background section, although a specific complementary binding site has been demonstrated only for some of the known miRNA genes (primarily Lin-4 and Let-7), all other recently discovered miRNA genes are also believed by those skilled in the art to modulate expression of other genes by complementary binding, although specific complementary binding sites of these other miRNA genes have not yet been found (Ruvkun G., Perspective: Glimpses of a tiny RNA world, Science 294, 779 (2001)).

[4038] It is yet further appreciated that a function of VGAM291 is inhibition of expression of host target genes, as part of a novel viral mechanism of attacking a host. Accordingly, utilities of VGAM291 include diagnosis, prevention and treatment of viral infection by Vaccinia virus. Specific functions, and accordingly utilities, of VGAM291 correlate with, and may be deduced from, the identity of the host target genes which VGAM291 binds and inhibits, and the function of these host target genes, as elaborated hereinbelow.

[4039] Nucleotide sequences of the VGAM291 precursor RNA, herein designated VGAM PRECURSOR RNA, and of the diced VGAM291 RNA, herein designated VGAM RNA, and a schematic representation of the secondary folding of VGAM291 folded precursor RNA, herein designated VGAM FOLDED PRECURSOR RNA, of VGAM291 are further described hereinbelow with reference to Table 1.

[4040] Nucleotide sequences of host target binding sites, such as BINDING SITE-I, BINDING SITE-II and BINDING SITE-III of FIG. 1, found on, and schematic representation of the complementarity of each of these host target binding sites to VGAM291 RNA, herein designated VGAM RNA, are described hereinbelow with reference to Table 2.

[4041] FIG. 1 further provides a conceptual description of another novel bioinformatically detected viral gene of the present invention, referred to here as Viral Genomic Address Messenger 292 (VGAM292) viral gene, which modulates expression of respective host target genes thereof, the function and utility of which host target genes is known in the art.

[4042] VGAM292 is a novel bioinformatically detected regulatory, non protein coding, viral micro RNA (miRNA) gene. The method by which VGAM292 was detected is described hereinabove with reference to FIGS. 2-8.

[4043] VGAM292 gene, herein designated VGAM GENE, is a viral gene contained in the genome of Vaccinia virus. VGAM292 host target gene, herein designated VGAM HOST TARGET GENE, is a human gene contained in the human genome.

[4044] VGAM292 gene, herein designated VGAM GENE, encodes a VGAM292 precursor RNA, herein designated VGAM PRECURSOR RNA. Similar to other miRNA genes, and unlike most ordinary genes, VGAM292 precursor RNA, herein designated VGAM PRECURSOR RNA, does not encode a protein. A nucleotide sequence identical or highly similar to the nucleotide sequence of VGAM292 precursor RNA is designated SEQ ID:278, and is provided hereinbelow with reference to the sequence listing part. Nucleotide sequence SEQ ID:278 is located at position 165010 relative to the genome of Vaccinia virus.

[4045] VGAM292 precursor RNA, herein designated VGAM PRECURSOR RNA, folds onto itself, forming VGAM292 folded precursor RNA, herein designated VGAM FOLDED PRECURSOR RNA, which has a two-dimensional hairpin structure. As is well known in the art, this hairpin structure, is typical of RNA encoded by miRNA genes, and is due to the fact that the nucleotide sequence of the first half of the RNA encoded by a miRNA gene is an accurate or partial inversed-reversed sequence of the nucleotide sequence of the second half thereof.

[4046] An enzyme complex designated DICER COMPLEX, dices the VGAM292 folded precursor RNA, herein designated VGAM FOLDED PRECURSOR RNA, into VGAM292 RNA, herein designated VGAM RNA, a single stranded ˜22 nt long RNA segment. As is known in the art, dicing of a hairpin structured RNA precursor product into a short ˜22 nt RNA segment is catalyzed by an enzyme complex comprising an enzyme called Dicer together with other necessary proteins. A probable (over 80%) nucleotide sequence of VGAM292 RNA is designated SEQ ID:627, and is provided hereinbelow with reference to the sequence listing part.

[4047] VGAM292 host target gene, herein designated VGAM HOST TARGET GENE, encodes a corresponding messenger RNA, VGAM292 host target RNA, herein designated VGAM HOST TARGET RNA. VGAM292 host target RNA, herein designated VGAM HOST TARGET RNA, comprises three regions, as is typical of mRNA of a protein coding gene: a 5 untranslated region, a protein coding region and a 3 untranslated region, designated 5UTR, PROTEIN CODING and 3UTR respectively.

[4048] VGAM292 RNA, herein designated VGAM RNA, binds complementarily to one or more host target binding sites located in untranslated regions of VGAM292 host target RNA, herein designated VGAM HOST TARGET RNA. This complementary binding is due to the fact that the nucleotide sequence of VGAM292 RNA, herein designated VGAM RNA, is an accurate or a partial inversed-reversed sequence of the nucleotide sequence of each of the host target binding sites. As an illustration, FIG. 1 shows 3 such host target binding sites, designated BINDING SITE I, BINDING SITE II and BINDING SITE III respectively. It is appreciated that the number of host target binding sites shown in FIG. 1 is meant as an illustration only, and is not meant to be limiting VGAM292 RNA, herein designated VGAM RNA, may have a different number of host target binding sites in untranslated regions of a VGAM292 host target RNA, herein designated VGAM HOST TARGET RNA. It is further appreciated that while FIG. 1 depicts host target binding sites in the 3UTR region, this is meant as an example only these host target binding sites may be located in the 3UTR region, the 5UTR region, or in both 3UTR and 5UTR regions.

[4049] The complementary binding of VGAM292 RNA, herein designated VGAM RNA, to host target binding sites on VGAM292 host target RNA, herein designated VGAM HOST TARGET RNA, such as BINDING SITE I, BINDING SITE II and BINDING SITE III, inhibits translation of VGAM292 host target RNA, herein designated VGAM HOST TARGET RNA, into VGAM292 host target protein, herein designated VGAM HOST TARGET PROTEIN. VGAM host target protein is therefore outlined by a broken line.

[4050] It is appreciated that VGAM292 host target gene, herein designated VGAM HOST TARGET GENE, in fact represents a plurality of VGAM292 host target genes. The mRNA of each one of this plurality of VGAM292 host target genes comprises one or more host target binding sites, each having a nucleotide sequence which is at least partly complementary to VGAM292 RNA, herein designated VGAM RNA, and which when bound by VGAM292 RNA, herein designated VGAM RNA, causes inhibition of translation of respective one or more VGAM292 host target proteins.

[4051] It is further appreciated by one skilled in the art that the mode of translational inhibition illustrated by FIG. 1 with specific reference to translational inhibition exerted by VGAM292 gene, herein designated VGAM GENE, on one or more VGAM292 host target gene, herein designated VGAM HOST TARGET GENE, is in fact common to other known non-viral miRNA genes. As mentioned hereinabove with reference to the background section, although a specific complementary binding site has been demonstrated only for some of the known miRNA genes (primarily Lin-4 and Let-7), all other recently discovered miRNA genes are also believed by those skilled in the art to modulate expression of other genes by complementary binding, although specific complementary binding sites of these other miRNA genes have not yet been found (Ruvkun G., Perspective: Glimpses of a tiny RNA world, Science 294, 779 (2001)).

[4052] It is yet further appreciated that a function of VGAM292 is inhibition of expression of host target genes, as part of a novel viral mechanism of attacking a host. Accordingly, utilities of VGAM292 include diagnosis, prevention and treatment of viral infection by Vaccinia virus. Specific functions, and accordingly utilities, of VGAM292 correlate with, and may be deduced from, the identity of the host target genes which VGAM292 binds and inhibits, and the function of these host target genes, as elaborated hereinbelow.

[4053] Nucleotide sequences of the VGAM292 precursor RNA, herein designated VGAM PRECURSOR RNA, and of the diced VGAM292 RNA, herein designated VGAM RNA, and a schematic representation of the secondary folding of VGAM292 folded precursor RNA, herein designated VGAM FOLDED PRECURSOR RNA, of VGAM292 are further described hereinbelow with reference to Table 1.

[4054] Nucleotide sequences of host target binding sites, such as BINDING SITE-I, BINDING SITE-II and BINDING SITE-III of FIG. 1, found on, and schematic representation of the complementarity of each of these host target binding sites to VGAM292 RNA, herein designated VGAM RNA, are described hereinbelow with reference to Table 2.

[4055] FIG. 1 further provides a conceptual description of another novel bioinformatically detected viral gene of the present invention, referred to here as Viral Genomic Address Messenger 293 (VGAM293) viral gene, which modulates expression of respective host target genes thereof, the function and utility of which host target genes is known in the art.

[4056] VGAM293 is a novel bioinformatically detected regulatory, non protein coding, viral micro RNA (miRNA) gene. The method by which VGAM293 was detected is described hereinabove with reference to FIGS. 2-8.

[4057] VGAM293 gene, herein designated VGAM GENE, is a viral gene contained in the genome of Vaccinia virus. VGAM293 host target gene, herein designated VGAM HOST TARGET GENE, is a human gene contained in the human genome.

[4058] VGAM293 gene, herein designated VGAM GENE, encodes a VGAM293 precursor RNA, herein designated VGAM PRECURSOR RNA. Similar to other miRNA genes, and unlike most ordinary genes, VGAM293 precursor RNA, herein designated VGAM PRECURSOR RNA, does not encode a protein. A nucleotide sequence identical or highly similar to the nucleotide sequence of VGAM293 precursor RNA is designated SEQ ID:279, and is provided hereinbelow with reference to the sequence listing part. Nucleotide sequence SEQ ID:279 is located at position 165185 relative to the genome of Vaccinia virus.

[4059] VGAM293 precursor RNA, herein designated VGAM PRECURSOR RNA, folds onto itself, forming VGAM293 folded precursor RNA, herein designated VGAM FOLDED PRECURSOR RNA, which has a two-dimensional hairpin structure. As is well known in the art, this hairpin structure, is typical of RNA encoded by miRNA genes, and is due to the fact that the nucleotide sequence of the first half of the RNA encoded by a miRNA gene is an accurate or partial inversed-reversed sequence of the nucleotide sequence of the second half thereof.

[4060] An enzyme complex designated DICER COMPLEX, dices the VGAM293 folded precursor RNA, herein designated VGAM FOLDED PRECURSOR RNA, into VGAM293 RNA, herein designated VGAM RNA, a single stranded ˜22 nt long RNA segment. As is known in the art, dicing of a hairpin structured RNA precursor product into a short ˜22 nt RNA segment is catalyzed by an enzyme complex comprising an enzyme called Dicer together with other necessary proteins. A probable (over 72%) nucleotide sequence of VGAM293 RNA is designated SEQ ID:628, and is provided hereinbelow with reference to the sequence listing part.

[4061] VGAM293 host target gene, herein designated VGAM HOST TARGET GENE, encodes a corresponding messenger RNA, VGAM293 host target RNA, herein designated VGAM HOST TARGET RNA. VGAM293 host target RNA, herein designated VGAM HOST TARGET RNA, comprises three regions, as is typical of mRNA of a protein coding gene: a 5 untranslated region, a protein coding region and a 3 untranslated region, designated 5UTR, PROTEIN CODING and 3UTR respectively.

[4062] VGAM293 RNA, herein designated VGAM RNA, binds complementarily to one or more host target binding sites located in untranslated regions of VGAM293 host target RNA, herein designated VGAM HOST TARGET RNA. This complementary binding is due to the fact that the nucleotide sequence of VGAM293 RNA, herein designated VGAM RNA, is an accurate or a partial inversed-reversed sequence of the nucleotide sequence of each of the host target binding sites. As an illustration, FIG. 1 shows 3 such host target binding sites, designated BINDING SITE I, BINDING SITE II and BINDING SITE III respectively. It is appreciated that the number of host target binding sites shown in FIG. 1 is meant as an illustration only, and is not meant to be limiting VGAM293 RNA, herein designated VGAM RNA, may have a different number of host target binding sites in untranslated regions of a VGAM293 host target RNA, herein designated VGAM HOST TARGET RNA. It is further appreciated that while FIG. 1 depicts host target binding sites in the 3UTR region, this is meant as an example only these host target binding sites may be located in the 3UTR region, the 5UTR region, or in both 3UTR and 5UTR regions.

[4063] The complementary binding of VGAM293 RNA, herein designated VGAM RNA, to host target binding sites on VGAM293 host target RNA, herein designated VGAM HOST TARGET RNA, such as BINDING SITE I, BINDING SITE II and BINDING SITE III, inhibits translation of VGAM293 host target RNA, herein designated VGAM HOST TARGET RNA, into VGAM293 host target protein, herein designated VGAM HOST TARGET PROTEIN. VGAM host target protein is therefore outlined by a broken line.

[4064] It is appreciated that VGAM293 host target gene, herein designated VGAM HOST TARGET GENE, in fact represents a plurality of VGAM293 host target genes. The mRNA of each one of this plurality of VGAM293 host target genes comprises one or more host target binding sites, each having a nucleotide sequence which is at least partly complementary to VGAM293 RNA, herein designated VGAM RNA, and which when bound by VGAM293 RNA, herein designated VGAM RNA, causes inhibition of translation of respective one or more VGAM293 host target proteins.

[4065] It is further appreciated by one skilled in the art that the mode of translational inhibition illustrated by FIG. 1 with specific reference to translational inhibition exerted by VGAM293 gene, herein designated VGAM GENE, on one or more VGAM293 host target gene, herein designated VGAM HOST TARGET GENE, is in fact common to other known non-viral miRNA genes. As mentioned hereinabove with reference to the background section, although a specific complementary binding site has been demonstrated only for some of the known miRNA genes (primarily Lin-4 and Let-7), all other recently discovered miRNA genes are also believed by those skilled in the art to modulate expression of other genes by complementary binding, although specific complementary binding sites of these other miRNA genes have not yet been found (Ruvkun G., Perspective: Glimpses of a tiny RNA world, Science 294, 779 (2001)).

[4066] It is yet further appreciated that a function of VGAM293 is inhibition of expression of host target genes, as part of a novel viral mechanism of attacking a host. Accordingly, utilities of VGAM293 include diagnosis, prevention and treatment of viral infection by Vaccinia virus. Specific functions, and accordingly utilities, of VGAM293 correlate with, and may be deduced from, the identity of the host target genes which VGAM293 binds and inhibits, and the function of these host target genes, as elaborated hereinbelow.

[4067] Nucleotide sequences of the VGAM293 precursor RNA, herein designated VGAM PRECURSOR RNA, and of the diced VGAM293 RNA, herein designated VGAM RNA, and a schematic representation of the secondary folding of VGAM293 folded precursor RNA, herein designated VGAM FOLDED PRECURSOR RNA, of VGAM293 are further described hereinbelow with reference to Table 1.

[4068] Nucleotide sequences of host target binding sites, such as BINDING SITE-I, BINDING SITE-II and BINDING SITE-III of FIG. 1, found on, and schematic representation of the complementarity of each of these host target binding sites to VGAM293 RNA, herein designated VGAM RNA, are described hereinbelow with reference to Table 2.

[4069] FIG. 1 further provides a conceptual description of another novel bioinformatically detected viral gene of the present invention, referred to here as Viral Genomic Address Messenger 294 (VGAM294) viral gene, which modulates expression of respective host target genes thereof, the function and utility of which host target genes is known in the art.

[4070] VGAM294 is a novel bioinformatically detected regulatory, non protein coding, viral micro RNA (miRNA) gene. The method by which VGAM294 was detected is described hereinabove with reference to FIGS. 2-8.

[4071] VGAM294 gene, herein designated VGAM GENE, is a viral gene contained in the genome of Vaccinia virus. VGAM294 host target gene, herein designated VGAM HOST TARGET GENE, is a human gene contained in the human genome.

[4072] VGAM294 gene, herein designated VGAM GENE, encodes a VGAM294 precursor RNA, herein designated VGAM PRECURSOR RNA. Similar to other miRNA genes, and unlike most ordinary genes, VGAM294 precursor RNA, herein designated VGAM PRECURSOR RNA, does not encode a protein. A nucleotide sequence identical or highly similar to the nucleotide sequence of VGAM294 precursor RNA is designated SEQ ID:280, and is provided hereinbelow with reference to the sequence listing part. Nucleotide sequence SEQ ID:280 is located at position 165538 relative to the genome of Vaccinia virus.

[4073] VGAM294 precursor RNA, herein designated VGAM PRECURSOR RNA, folds onto itself, forming VGAM294 folded precursor RNA, herein designated VGAM FOLDED PRECURSOR RNA, which has a two-dimensional hairpin structure. As is well known in the art, this hairpin structure, is typical of RNA encoded by miRNA genes, and is due to the fact that the nucleotide sequence of the first half of the RNA encoded by a miRNA gene is an accurate or partial inversed-reversed sequence of the nucleotide sequence of the second half thereof.

[4074] An enzyme complex designated DICER COMPLEX, dices the VGAM294 folded precursor RNA, herein designated VGAM FOLDED PRECURSOR RNA, into VGAM294 RNA, herein designated VGAM RNA, a single stranded ˜22 nt long RNA segment. As is known in the art, dicing of a hairpin structured RNA precursor product into a short ˜22 nt RNA segment is catalyzed by an enzyme complex comprising an enzyme called Dicer together with other necessary proteins. A probable (over 90%) nucleotide sequence of VGAM294 RNA is designated SEQ ID:629, and is provided hereinbelow with reference to the sequence listing part.

[4075] VGAM294 host target gene, herein designated VGAM HOST TARGET GENE, encodes a corresponding messenger RNA, VGAM294 host target RNA, herein designated VGAM HOST TARGET RNA. VGAM294 host target RNA, herein designated VGAM HOST TARGET RNA, comprises three regions, as is typical of mRNA of a protein coding gene: a 5 untranslated region, a protein coding region and a 3 untranslated region, designated 5UTR, PROTEIN CODING and 3UTR respectively.

[4076] VGAM294 RNA, herein designated VGAM RNA, binds complementarily to one or more host target binding sites located in untranslated regions of VGAM294 host target RNA, herein designated VGAM HOST TARGET RNA. This complementary binding is due to the fact that the nucleotide sequence of VGAM294 RNA, herein designated VGAM RNA, is an accurate or a partial inversed-reversed sequence of the nucleotide sequence of each of the host target binding sites. As an illustration, FIG. 1 shows 3 such host target binding sites, designated BINDING SITE I, BINDING SITE II and BINDING SITE III respectively. It is appreciated that the number of host target binding sites shown in FIG. 1 is meant as an illustration only, and is not meant to be limiting VGAM294 RNA, herein designated VGAM RNA, may have a different number of host target binding sites in untranslated regions of a VGAM294 host target RNA, herein designated VGAM HOST TARGET RNA. It is further appreciated that while FIG. 1 depicts host target binding sites in the 3UTR region, this is meant as an example only these host target binding sites may be located in the 3UTR region, the 5UTR region, or in both 3UTR and 5UTR regions.

[4077] The complementary binding of VGAM294 RNA, herein designated VGAM RNA, to host target binding sites on VGAM294 host target RNA, herein designated VGAM HOST TARGET RNA, such as BINDING SITE I, BINDING SITE II and BINDING SITE III, inhibits translation of VGAM294 host target RNA, herein designated VGAM HOST TARGET RNA, into VGAM294 host target protein, herein designated VGAM HOST TARGET PROTEIN. VGAM host target protein is therefore outlined by a broken line.

[4078] It is appreciated that VGAM294 host target gene, herein designated VGAM HOST TARGET GENE, in fact represents a plurality of VGAM294 host target genes. The mRNA of each one of this plurality of VGAM294 host target genes comprises one or more host target binding sites, each having a nucleotide sequence which is at least partly complementary to VGAM294 RNA, herein designated VGAM RNA, and which when bound by VGAM294 RNA, herein designated VGAM RNA, causes inhibition of translation of respective one or more VGAM294 host target proteins.

[4079] It is further appreciated by one skilled in the art that the mode of translational inhibition illustrated by FIG. 1 with specific reference to translational inhibition exerted by VGAM294 gene, herein designated VGAM GENE, on one or more VGAM294 host target gene, herein designated VGAM HOST TARGET GENE, is in fact common to other known non-viral miRNA genes. As mentioned hereinabove with reference to the background section, although a specific complementary binding site has been demonstrated only for some of the known miRNA genes (primarily Lin-4 and Let-7), all other recently discovered miRNA genes are also believed by those skilled in the art to modulate expression of other genes by complementary binding, although specific complementary binding sites of these other miRNA genes have not yet been found (Ruvkun G., Perspective: Glimpses of a tiny RNA world, Science 294, 779 (2001)).

[4080] It is yet further appreciated that a function of VGAM294 is inhibition of expression of host target genes, as part of a novel viral mechanism of attacking a host. Accordingly, utilities of VGAM294 include diagnosis, prevention and treatment of viral infection by Vaccinia virus. Specific functions, and accordingly utilities, of VGAM294 correlate with, and may be deduced from, the identity of the host target genes which VGAM294 binds and inhibits, and the function of these host target genes, as elaborated hereinbelow.

[4081] Nucleotide sequences of the VGAM294 precursor RNA, herein designated VGAM PRECURSOR RNA, and of the diced VGAM294 RNA, herein designated VGAM RNA, and a schematic representation of the secondary folding of VGAM294 folded precursor RNA, herein designated VGAM FOLDED PRECURSOR RNA, of VGAM294 are further described hereinbelow with reference to Table 1.

[4082] Nucleotide sequences of host target binding sites, such as BINDING SITE-I, BINDING SITE-II and BINDING SITE-III of FIG. 1, found on, and schematic representation of the complementarity of each of these host target binding sites to VGAM294 RNA, herein designated VGAM RNA, are described hereinbelow with reference to Table 2.

[4083] FIG. 1 further provides a conceptual description of another novel bioinformatically detected viral gene of the present invention, referred to here as Viral Genomic Address Messenger 295 (VGAM295) viral gene, which modulates expression of respective host target genes thereof, the function and utility of which host target genes is known in the art.

[4084] VGAM295 is a novel bioinformatically detected regulatory, non protein coding, viral micro RNA (miRNA) gene. The method by which VGAM295 was detected is described hereinabove with reference to FIGS. 2-8.

[4085] VGAM295 gene, herein designated VGAM GENE, is a viral gene contained in the genome of Vaccinia virus. VGAM295 host target gene, herein designated VGAM HOST TARGET GENE, is a human gene contained in the human genome.

[4086] VGAM295 gene, herein designated VGAM GENE, encodes a VGAM295 precursor RNA, herein designated VGAM PRECURSOR RNA. Similar to other miRNA genes, and unlike most ordinary genes, VGAM295 precursor RNA, herein designated VGAM PRECURSOR RNA, does not encode a protein. A nucleotide sequence identical or highly similar to the nucleotide sequence of VGAM295 precursor RNA is designated SEQ ID:281, and is provided hereinbelow with reference to the sequence listing part. Nucleotide sequence SEQ ID:281 is located at position 172682 relative to the genome of Vaccinia virus.

[4087] VGAM295 precursor RNA, herein designated VGAM PRECURSOR RNA, folds onto itself, forming VGAM295 folded precursor RNA, herein designated VGAM FOLDED PRECURSOR RNA, which has a two-dimensional hairpin structure. As is well known in the art, this hairpin structure, is typical of RNA encoded by miRNA genes, and is due to the fact that the nucleotide sequence of the first half of the RNA encoded by a miRNA gene is an accurate or partial inversed-reversed sequence of the nucleotide sequence of the second half thereof.

[4088] An enzyme complex designated DICER COMPLEX, dices the VGAM295 folded precursor RNA, herein designated VGAM FOLDED PRECURSOR RNA, into VGAM295 RNA, herein designated VGAM RNA, a single stranded ˜22 nt long RNA segment. As is known in the art, dicing of a hairpin structured RNA precursor product into a short ˜22 nt RNA segment is catalyzed by an enzyme complex comprising an enzyme called Dicer together with other necessary proteins. A probable (over 72%) nucleotide sequence of VGAM295 RNA is designated SEQ ID:630, and is provided hereinbelow with reference to the sequence listing part.

[4089] VGAM295 host target gene, herein designated VGAM HOST TARGET GENE, encodes a corresponding messenger RNA, VGAM295 host target RNA, herein designated VGAM HOST TARGET RNA. VGAM295 host target RNA, herein designated VGAM HOST TARGET RNA, comprises three regions, as is typical of mRNA of a protein coding gene: a 5 untranslated region, a protein coding region and a 3 untranslated region, designated 5UTR, PROTEIN CODING and 3UTR respectively.

[4090] VGAM295 RNA, herein designated VGAM RNA, binds complementarily to one or more host target binding sites located in untranslated regions of VGAM295 host target RNA, herein designated VGAM HOST TARGET RNA. This complementary binding is due to the fact that the nucleotide sequence of VGAM295 RNA, herein designated VGAM RNA, is an accurate or a partial inversed-reversed sequence of the nucleotide sequence of each of the host target binding sites. As an illustration, FIG. 1 shows 3 such host target binding sites, designated BINDING SITE I, BINDING SITE II and BINDING SITE III respectively. It is appreciated that the number of host target binding sites shown in FIG. 1 is meant as an illustration only, and is not meant to be limiting VGAM295 RNA, herein designated VGAM RNA, may have a different number of host target binding sites in untranslated regions of a VGAM295 host target RNA, herein designated VGAM HOST TARGET RNA. It is further appreciated that while FIG. 1 depicts host target binding sites in the 3UTR region, this is meant as an example only these host target binding sites may be located in the 3UTR region, the 5UTR region, or in both 3UTR and 5UTR regions.

[4091] The complementary binding of VGAM295 RNA, herein designated VGAM RNA, to host target binding sites on VGAM295 host target RNA, herein designated VGAM HOST TARGET RNA, such as BINDING SITE I, BINDING SITE II and BINDING SITE III, inhibits translation of VGAM295 host target RNA, herein designated VGAM HOST TARGET RNA, into VGAM295 host target protein, herein designated VGAM HOST TARGET PROTEIN. VGAM host target protein is therefore outlined by a broken line.

[4092] It is appreciated that VGAM295 host target gene, herein designated VGAM HOST TARGET GENE, in fact represents a plurality of VGAM295 host target genes. The mRNA of each one of this plurality of VGAM295 host target genes comprises one or more host target binding sites, each having a nucleotide sequence which is at least partly complementary to VGAM295 RNA, herein designated VGAM RNA, and which when bound by VGAM295 RNA, herein designated VGAM RNA, causes inhibition of translation of respective one or more VGAM295 host target proteins.

[4093] It is further appreciated by one skilled in the art that the mode of translational inhibition illustrated by FIG. 1 with specific reference to translational inhibition exerted by VGAM295 gene, herein designated VGAM GENE, on one or more VGAM295 host target gene, herein designated VGAM HOST TARGET GENE, is in fact common to other known non-viral miRNA genes. As mentioned hereinabove with reference to the background section, although a specific complementary binding site has been demonstrated only for some of the known miRNA genes (primarily Lin-4 and Let-7), all other recently discovered miRNA genes are also believed by those skilled in the art to modulate expression of other genes by complementary binding, although specific complementary binding sites of these other miRNA genes have not yet been found (Ruvkun G., Perspective: Glimpses of a tiny RNA world, Science 294, 779 (2001)).

[4094] It is yet further appreciated that a function of VGAM295 is inhibition of expression of host target genes, as part of a novel viral mechanism of attacking a host. Accordingly, utilities of VGAM295 include diagnosis, prevention and treatment of viral infection by Vaccinia virus. Specific functions, and accordingly utilities, of VGAM295 correlate with, and may be deduced from, the identity of the host target genes which VGAM295 binds and inhibits, and the function of these host target genes, as elaborated hereinbelow.

[4095] Nucleotide sequences of the VGAM295 precursor RNA, herein designated VGAM PRECURSOR RNA, and of the diced VGAM295 RNA, herein designated VGAM RNA, and a schematic representation of the secondary folding of VGAM295 folded precursor RNA, herein designated VGAM FOLDED PRECURSOR RNA, of VGAM295 are further described hereinbelow with reference to Table 1.

[4096] Nucleotide sequences of host target binding sites, such as BINDING SITE-I, BINDING SITE-II and BINDING SITE-III of FIG. 1, found on, and schematic representation of the complementarity of each of these host target binding sites to VGAM295 RNA, herein designated VGAM RNA, are described hereinbelow with reference to Table 2.

[4097] FIG. 1 further provides a conceptual description of another novel bioinformatically detected viral gene of the present invention, referred to here as Viral Genomic Address Messenger 296 (VGAM296) viral gene, which modulates expression of respective host target genes thereof, the function and utility of which host target genes is known in the art.

[4098] VGAM296 is a novel bioinformatically detected regulatory, non protein coding, viral micro RNA (miRNA) gene. The method by which VGAM296 was detected is described hereinabove with reference to FIGS. 2-8.

[4099] VGAM296 gene, herein designated VGAM GENE, is a viral gene contained in the genome of Vaccinia virus. VGAM296 host target gene, herein designated VGAM HOST TARGET GENE, is a human gene contained in the human genome.

[4100] VGAM296 gene, herein designated VGAM GENE, encodes a VGAM296 precursor RNA, herein designated VGAM PRECURSOR RNA. Similar to other miRNA genes, and unlike most ordinary genes, VGAM296 precursor RNA, herein designated VGAM PRECURSOR RNA, does not encode a protein. A nucleotide sequence identical or highly similar to the nucleotide sequence of VGAM296 precursor RNA is designated SEQ ID:282, and is provided hereinbelow with reference to the sequence listing part. Nucleotide sequence SEQ ID:282 is located at position 169865 relative to the genome of Vaccinia virus.

[4101] VGAM296 precursor RNA, herein designated VGAM PRECURSOR RNA, folds onto itself, forming VGAM296 folded precursor RNA, herein designated VGAM FOLDED PRECURSOR RNA, which has a two-dimensional hairpin structure. As is well known in the art, this hairpin structure, is typical of RNA encoded by miRNA genes, and is due to the fact that the nucleotide sequence of the first half of the RNA encoded by a miRNA gene is an accurate or partial inversed-reversed sequence of the nucleotide sequence of the second half thereof.

[4102] An enzyme complex designated DICER COMPLEX, dices the VGAM296 folded precursor RNA, herein designated VGAM FOLDED PRECURSOR RNA, into VGAM296 RNA, herein designated VGAM RNA, a single stranded ˜22 nt long RNA segment. As is known in the art, dicing of a hairpin structured RNA precursor product into a short ˜22 nt RNA segment is catalyzed by an enzyme complex comprising an enzyme called Dicer together with other necessary proteins. A probable (over 80%) nucleotide sequence of VGAM296 RNA is designated SEQ ID:631, and is provided hereinbelow with reference to the sequence listing part.

[4103] VGAM296 host target gene, herein designated VGAM HOST TARGET GENE, encodes a corresponding messenger RNA, VGAM296 host target RNA, herein designated VGAM HOST TARGET RNA. VGAM296 host target RNA, herein designated VGAM HOST TARGET RNA, comprises three regions, as is typical of mRNA of a protein coding gene: a 5 untranslated region, a protein coding region and a 3 untranslated region, designated 5UTR, PROTEIN CODING and 3UTR respectively.

[4104] VGAM296 RNA, herein designated VGAM RNA, binds complementarily to one or more host target binding sites located in untranslated regions of VGAM296 host target RNA, herein designated VGAM HOST TARGET RNA. This complementary binding is due to the fact that the nucleotide sequence of VGAM296 RNA, herein designated VGAM RNA, is an accurate or a partial inversed-reversed sequence of the nucleotide sequence of each of the host target binding sites. As an illustration, FIG. 1 shows 3 such host target binding sites, designated BINDING SITE I, BINDING SITE II and BINDING SITE III respectively. It is appreciated that the number of host target binding sites shown in FIG. 1 is meant as an illustration only, and is not meant to be limiting VGAM296 RNA, herein designated VGAM RNA, may have a different number of host target binding sites in untranslated regions of a VGAM296 host target RNA, herein designated VGAM HOST TARGET RNA. It is further appreciated that while FIG. 1 depicts host target binding sites in the 3UTR region, this is meant as an example only these host target binding sites may be located in the 3UTR region, the 5UTR region, or in both 3UTR and 5UTR regions.

[4105] The complementary binding of VGAM296 RNA, herein designated VGAM RNA, to host target binding sites on VGAM296 host target RNA, herein designated VGAM HOST TARGET RNA, such as BINDING SITE I, BINDING SITE II and BINDING SITE III, inhibits translation of VGAM296 host target RNA, herein designated VGAM HOST TARGET RNA, into VGAM296 host target protein, herein designated VGAM HOST TARGET PROTEIN. VGAM host target protein is therefore outlined by a broken line.

[4106] It is appreciated that VGAM296 host target gene, herein designated VGAM HOST TARGET GENE, in fact represents a plurality of VGAM296 host target genes. The mRNA of each one of this plurality of VGAM296 host target genes comprises one or more host target binding sites, each having a nucleotide sequence which is at least partly complementary to VGAM296 RNA, herein designated VGAM RNA, and which when bound by VGAM296 RNA, herein designated VGAM RNA, causes inhibition of translation of respective one or more VGAM296 host target proteins.

[4107] It is further appreciated by one skilled in the art that the mode of translational inhibition illustrated by FIG. 1 with specific reference to translational inhibition exerted by VGAM296 gene, herein designated VGAM GENE, on one or more VGAM296 host target gene, herein designated VGAM HOST TARGET GENE, is in fact common to other known non-viral miRNA genes. As mentioned hereinabove with reference to the background section, although a specific complementary binding site has been demonstrated only for some of the known miRNA genes (primarily Lin-4 and Let-7), all other recently discovered miRNA genes are also believed by those skilled in the art to modulate expression of other genes by complementary binding, although specific complementary binding sites of these other miRNA genes have not yet been found (Ruvkun G., Perspective: Glimpses of a tiny RNA world, Science 294, 779 (2001)).

[4108] It is yet further appreciated that a function of VGAM296 is inhibition of expression of host target genes, as part of a novel viral mechanism of attacking a host. Accordingly, utilities of VGAM296 include diagnosis, prevention and treatment of viral infection by Vaccinia virus. Specific functions, and accordingly utilities, of VGAM296 correlate with, and may be deduced from, the identity of the host target genes which VGAM296 binds and inhibits, and the function of these host target genes, as elaborated hereinbelow.

[4109] Nucleotide sequences of the VGAM296 precursor RNA, herein designated VGAM PRECURSOR RNA, and of the diced VGAM296 RNA, herein designated VGAM RNA, and a schematic representation of the secondary folding of VGAM296 folded precursor RNA, herein designated VGAM FOLDED PRECURSOR RNA, of VGAM296 are further described hereinbelow with reference to Table 1.

[4110] Nucleotide sequences of host target binding sites, such as BINDING SITE-I, BINDING SITE-II and BINDING SITE-III of FIG. 1, found on, and schematic representation of the complementarity of each of these host target binding sites to VGAM296 RNA, herein designated VGAM RNA, are described hereinbelow with reference to Table 2.

[4111] FIG. 1 further provides a conceptual description of another novel bioinformatically detected viral gene of the present invention, referred to here as Viral Genomic Address Messenger 297 (VGAM297) viral gene, which modulates expression of respective host target genes thereof, the function and utility of which host target genes is known in the art.

[4112] VGAM297 is a novel bioinformatically detected regulatory, non protein coding, viral micro RNA (miRNA) gene. The method by which VGAM297 was detected is described hereinabove with reference to FIGS. 2-8.

[4113] VGAM297 gene, herein designated VGAM GENE, is a viral gene contained in the genome of Vaccinia virus. VGAM297 host target gene, herein designated VGAM HOST TARGET GENE, is a human gene contained in the human genome.

[4114] VGAM297 gene, herein designated VGAM GENE, encodes a VGAM297 precursor RNA, herein designated VGAM PRECURSOR RNA. Similar to other miRNA genes, and unlike most ordinary genes, VGAM297 precursor RNA, herein designated VGAM PRECURSOR RNA, does not encode a protein. A nucleotide sequence identical or highly similar to the nucleotide sequence of VGAM297 precursor RNA is designated SEQ ID:283, and is provided hereinbelow with reference to the sequence listing part. Nucleotide sequence SEQ ID:283 is located at position 170506 relative to the genome of Vaccinia virus.

[4115] VGAM297 precursor RNA, herein designated VGAM PRECURSOR RNA, folds onto itself, forming VGAM297 folded precursor RNA, herein designated VGAM FOLDED PRECURSOR RNA, which has a two-dimensional hairpin structure. As is well known in the art, this hairpin structure, is typical of RNA encoded by miRNA genes, and is due to the fact that the nucleotide sequence of the first half of the RNA encoded by a miRNA gene is an accurate or partial inversed-reversed sequence of the nucleotide sequence of the second half thereof.

[4116] An enzyme complex designated DICER COMPLEX, dices the VGAM297 folded precursor RNA, herein designated VGAM FOLDED PRECURSOR RNA, into VGAM297 RNA, herein designated VGAM RNA, a single stranded ˜22 nt long RNA segment. As is known in the art, dicing of a hairpin structured RNA precursor product into a short ˜22 nt RNA segment is catalyzed by an enzyme complex comprising an enzyme called Dicer together with other necessary proteins. A probable (over 77%) nucleotide sequence of VGAM297 RNA is designated SEQ ID:632, and is provided hereinbelow with reference to the sequence listing part.

[4117] VGAM297 host target gene, herein designated VGAM HOST TARGET GENE, encodes a corresponding messenger RNA, VGAM297 host target RNA, herein designated VGAM HOST TARGET RNA. VGAM297 host target RNA, herein designated VGAM HOST TARGET RNA, comprises three regions, as is typical of mRNA of a protein coding gene: a 5 untranslated region, a protein coding region and a 3 untranslated region, designated 5UTR, PROTEIN CODING and 3UTR respectively.

[4118] VGAM297 RNA, herein designated VGAM RNA, binds complementarily to one or more host target binding sites located in untranslated regions of VGAM297 host target RNA, herein designated VGAM HOST TARGET RNA. This complementary binding is due to the fact that the nucleotide sequence of VGAM297 RNA, herein designated VGAM RNA, is an accurate or a partial inversed-reversed sequence of the nucleotide sequence of each of the host target binding sites. As an illustration, FIG. 1 shows 3 such host target binding sites, designated BINDING SITE I, BINDING SITE II and BINDING SITE III respectively. It is appreciated that the number of host target binding sites shown in FIG. 1 is meant as an illustration only, and is not meant to be limiting VGAM297 RNA, herein designated VGAM RNA, may have a different number of host target binding sites in untranslated regions of a VGAM297 host target RNA, herein designated VGAM HOST TARGET RNA. It is further appreciated that while FIG. 1 depicts host target binding sites in the 3UTR region, this is meant as an example only these host target binding sites may be located in the 3UTR region, the 5UTR region, or in both 3UTR and 5UTR regions.

[4119] The complementary binding of VGAM297 RNA, herein designated VGAM RNA, to host target binding sites on VGAM297 host target RNA, herein designated VGAM HOST TARGET RNA, such as BINDING SITE I, BINDING SITE II and BINDING SITE III, inhibits translation of VGAM297 host target RNA, herein designated VGAM HOST TARGET RNA, into VGAM297 host target protein, herein designated VGAM HOST TARGET PROTEIN. VGAM host target protein is therefore outlined by a broken line.

[4120] It is appreciated that VGAM297 host target gene, herein designated VGAM HOST TARGET GENE, in fact represents a plurality of VGAM297 host target genes. The mRNA of each one of this plurality of VGAM297 host target genes comprises one or more host target binding sites, each having a nucleotide sequence which is at least partly complementary to VGAM297 RNA, herein designated VGAM RNA, and which when bound by VGAM297 RNA, herein designated VGAM RNA, causes inhibition of translation of respective one or more VGAM297 host target proteins.

[4121] It is further appreciated by one skilled in the art that the mode of translational inhibition illustrated by FIG. 1 with specific reference to translational inhibition exerted by VGAM297 gene, herein designated VGAM GENE, on one or more VGAM297 host target gene, herein designated VGAM HOST TARGET GENE, is in fact common to other known non-viral miRNA genes. As mentioned hereinabove with reference to the background section, although a specific complementary binding site has been demonstrated only for some of the known miRNA genes (primarily Lin-4 and Let-7), all other recently discovered miRNA genes are also believed by those skilled in the art to modulate expression of other genes by complementary binding, although specific complementary binding sites of these other miRNA genes have not yet been found (Ruvkun G., Perspective: Glimpses of a tiny RNA world, Science 294, 779 (2001)).

[4122] It is yet further appreciated that a function of VGAM297 is inhibition of expression of host target genes, as part of a novel viral mechanism of attacking a host. Accordingly, utilities of VGAM297 include diagnosis, prevention and treatment of viral infection by Vaccinia virus. Specific functions, and accordingly utilities, of VGAM297 correlate with, and may be deduced from, the identity of the host target genes which VGAM297 binds and inhibits, and the function of these host target genes, as elaborated hereinbelow.

[4123] Nucleotide sequences of the VGAM297 precursor RNA, herein designated VGAM PRECURSOR RNA, and of the diced VGAM297 RNA, herein designated VGAM RNA, and a schematic representation of the secondary folding of VGAM297 folded precursor RNA, herein designated VGAM FOLDED PRECURSOR RNA, of VGAM297 are further described hereinbelow with reference to Table 1.

[4124] Nucleotide sequences of host target binding sites, such as BINDING SITE-I, BINDING SITE-II and BINDING SITE-III of FIG. 1, found on, and schematic representation of the complementarity of each of these host target binding sites to VGAM297 RNA, herein designated VGAM RNA, are described hereinbelow with reference to Table 2.

[4125] FIG. 1 further provides a conceptual description of another novel bioinformatically detected viral gene of the present invention, referred to here as Viral Genomic Address Messenger 298 (VGAM298) viral gene, which modulates expression of respective host target genes thereof, the function and utility of which host target genes is known in the art.

[4126] VGAM298 is a novel bioinformatically detected regulatory, non protein coding, viral micro RNA (miRNA) gene. The method by which VGAM298 was detected is described hereinabove with reference to FIGS. 2-8.

[4127] VGAM298 gene, herein designated VGAM GENE, is a viral gene contained in the genome of Vaccinia virus. VGAM298 host target gene, herein designated VGAM HOST TARGET GENE, is a human gene contained in the human genome.

[4128] VGAM298 gene, herein designated VGAM GENE, encodes a VGAM298 precursor RNA, herein designated VGAM PRECURSOR RNA. Similar to other miRNA genes, and unlike most ordinary genes, VGAM298 precursor RNA, herein designated VGAM PRECURSOR RNA, does not encode a protein. A nucleotide sequence identical or highly similar to the nucleotide sequence of VGAM298 precursor RNA is designated SEQ ID:284, and is provided hereinbelow with reference to the sequence listing part. Nucleotide sequence SEQ ID:284 is located at position 173577 relative to the genome of Vaccinia virus.

[4129] VGAM298 precursor RNA, herein designated VGAM PRECURSOR RNA, folds onto itself, forming VGAM298 folded precursor RNA, herein designated VGAM FOLDED PRECURSOR RNA, which has a two-dimensional hairpin structure. As is well known in the art, this hairpin structure, is typical of RNA encoded by miRNA genes, and is due to the fact that the nucleotide sequence of the first half of the RNA encoded by a miRNA gene is an accurate or partial inversed-reversed sequence of the nucleotide sequence of the second half thereof.

[4130] An enzyme complex designated DICER COMPLEX, dices the VGAM298 folded precursor RNA, herein designated VGAM FOLDED PRECURSOR RNA, into VGAM298 RNA, herein designated VGAM RNA, a single stranded ˜22 nt long RNA segment. As is known in the art, dicing of a hairpin structured RNA precursor product into a short ˜22 nt RNA segment is catalyzed by an enzyme complex comprising an enzyme called Dicer together with other necessary proteins. A probable (over 79%) nucleotide sequence of VGAM298 RNA is designated SEQ ID:633, and is provided hereinbelow with reference to the sequence listing part.

[4131] VGAM298 host target gene, herein designated VGAM HOST TARGET GENE, encodes a corresponding messenger RNA, VGAM298 host target RNA, herein designated VGAM HOST TARGET RNA. VGAM298 host target RNA, herein designated VGAM HOST TARGET RNA, comprises three regions, as is typical of mRNA of a protein coding gene: a 5 untranslated region, a protein coding region and a 3 untranslated region, designated 5UTR, PROTEIN CODING and 3UTR respectively.

[4132] VGAM298 RNA, herein designated VGAM RNA, binds complementarily to one or more host target binding sites located in untranslated regions of VGAM298 host target RNA, herein designated VGAM HOST TARGET RNA. This complementary binding is due to the fact that the nucleotide sequence of VGAM298 RNA, herein designated VGAM RNA, is an accurate or a partial inversed-reversed sequence of the nucleotide sequence of each of the host target binding sites. As an illustration, FIG. 1 shows 3 such host target binding sites, designated BINDING SITE I, BINDING SITE II and BINDING SITE III respectively. It is appreciated that the number of host target binding sites shown in FIG. 1 is meant as an illustration only, and is not meant to be limiting VGAM298 RNA, herein designated VGAM RNA, may have a different number of host target binding sites in untranslated regions of a VGAM298 host target RNA, herein designated VGAM HOST TARGET RNA. It is further appreciated that while FIG. 1 depicts host target binding sites in the 3UTR region, this is meant as an example only these host target binding sites may be located in the 3UTR region, the 5UTR region, or in both 3UTR and 5UTR regions.

[4133] The complementary binding of VGAM298 RNA, herein designated VGAM RNA, to host target binding sites on VGAM298 host target RNA, herein designated VGAM HOST TARGET RNA, such as BINDING SITE I, BINDING SITE II and BINDING SITE III, inhibits translation of VGAM298 host target RNA, herein designated VGAM HOST TARGET RNA, into VGAM298 host target protein, herein designated VGAM HOST TARGET PROTEIN. VGAM host target protein is therefore outlined by a broken line.

[4134] It is appreciated that VGAM298 host target gene, herein designated VGAM HOST TARGET GENE, in fact represents a plurality of VGAM298 host target genes. The mRNA of each one of this plurality of VGAM298 host target genes comprises one or more host target binding sites, each having a nucleotide sequence which is at least partly complementary to VGAM298 RNA, herein designated VGAM RNA, and which when bound by VGAM298 RNA, herein designated VGAM RNA, causes inhibition of translation of respective one or more VGAM298 host target proteins.

[4135] It is further appreciated by one skilled in the art that the mode of translational inhibition illustrated by FIG. 1 with specific reference to translational inhibition exerted by VGAM298 gene, herein designated VGAM GENE, on one or more VGAM298 host target gene, herein designated VGAM HOST TARGET GENE, is in fact common to other known non-viral miRNA genes. As mentioned hereinabove with reference to the background section, although a specific complementary binding site has been demonstrated only for some of the known miRNA genes (primarily Lin-4 and Let-7), all other recently discovered miRNA genes are also believed by those skilled in the art to modulate expression of other genes by complementary binding, although specific complementary binding sites of these other miRNA genes have not yet been found (Ruvkun G., Perspective: Glimpses of a tiny RNA world, Science 294, 779 (2001)).

[4136] It is yet further appreciated that a function of VGAM298 is inhibition of expression of host target genes, as part of a novel viral mechanism of attacking a host. Accordingly, utilities of VGAM298 include diagnosis, prevention and treatment of viral infection by Vaccinia virus. Specific functions, and accordingly utilities, of VGAM298 correlate with, and may be deduced from, the identity of the host target genes which VGAM298 binds and inhibits, and the function of these host target genes, as elaborated hereinbelow.

[4137] Nucleotide sequences of the VGAM298 precursor RNA, herein designated VGAM PRECURSOR RNA, and of the diced VGAM298 RNA, herein designated VGAM RNA, and a schematic representation of the secondary folding of VGAM298 folded precursor RNA, herein designated VGAM FOLDED PRECURSOR RNA, of VGAM298 are further described hereinbelow with reference to Table 1.

[4138] Nucleotide sequences of host target binding sites, such as BINDING SITE-I, BINDING SITE-II and BINDING SITE-III of FIG. 1, found on, and schematic representation of the complementarity of each of these host target binding sites to VGAM298 RNA, herein designated VGAM RNA, are described hereinbelow with reference to Table 2.

[4139] FIG. 1 further provides a conceptual description of another novel bioinformatically detected viral gene of the present invention, referred to here as Viral Genomic Address Messenger 299 (VGAM299) viral gene, which modulates expression of respective host target genes thereof, the function and utility of which host target genes is known in the art.

[4140] VGAM299 is a novel bioinformatically detected regulatory, non protein coding, viral micro RNA (miRNA) gene. The method by which VGAM299 was detected is described hereinabove with reference to FIGS. 2-8.

[4141] VGAM299 gene, herein designated VGAM GENE, is a viral gene contained in the genome of Vaccinia virus. VGAM299 host target gene, herein designated VGAM HOST TARGET GENE, is a human gene contained in the human genome.

[4142] VGAM299 gene, herein designated VGAM GENE, encodes a VGAM299 precursor RNA, herein designated VGAM PRECURSOR RNA. Similar to other miRNA genes, and unlike most ordinary genes, VGAM299 precursor RNA, herein designated VGAM PRECURSOR RNA, does not encode a protein. A nucleotide sequence identical or highly similar to the nucleotide sequence of VGAM299 precursor RNA is designated SEQ ID:285, and is provided hereinbelow with reference to the sequence listing part. Nucleotide sequence SEQ ID:285 is located at position 168765 relative to the genome of Vaccinia virus.

[4143] VGAM299 precursor RNA, herein designated VGAM PRECURSOR RNA, folds onto itself, forming VGAM299 folded precursor RNA, herein designated VGAM FOLDED PRECURSOR RNA, which has a two-dimensional hairpin structure. As is well known in the art, this hairpin structure, is typical of RNA encoded by miRNA genes, and is due to the fact that the nucleotide sequence of the first half of the RNA encoded by a miRNA gene is an accurate or partial inversed-reversed sequence of the nucleotide sequence of the second half thereof.

[4144] An enzyme complex designated DICER COMPLEX, dices the VGAM299 folded precursor RNA, herein designated VGAM FOLDED PRECURSOR RNA, into VGAM299 RNA, herein designated VGAM RNA, a single stranded ˜22 nt long RNA segment. As is known in the art, dicing of a hairpin structured RNA precursor product into a short ˜22 nt RNA segment is catalyzed by an enzyme complex comprising an enzyme called Dicer together with other necessary proteins. A probable (over 25%) nucleotide sequence of VGAM299 RNA is designated SEQ ID:634, and is provided hereinbelow with reference to the sequence listing part.

[4145] VGAM299 host target gene, herein designated VGAM HOST TARGET GENE, encodes a corresponding messenger RNA, VGAM299 host target RNA, herein designated VGAM HOST TARGET RNA. VGAM299 host target RNA, herein designated VGAM HOST TARGET RNA, comprises three regions, as is typical of mRNA of a protein coding gene: a 5 untranslated region, a protein coding region and a 3 untranslated region, designated 5UTR, PROTEIN CODING and 3UTR respectively.

[4146] VGAM299 RNA, herein designated VGAM RNA, binds complementarily to one or more host target binding sites located in untranslated regions of VGAM299 host target RNA, herein designated VGAM HOST TARGET RNA. This complementary binding is due to the fact that the nucleotide sequence of VGAM299 RNA, herein designated VGAM RNA, is an accurate or a partial inversed-reversed sequence of the nucleotide sequence of each of the host target binding sites. As an illustration, FIG. 1 shows 3 such host target binding sites, designated BINDING SITE I, BINDING SITE II and BINDING SITE III respectively. It is appreciated that the number of host target binding sites shown in FIG. 1 is meant as an illustration only, and is not meant to be limiting VGAM299 RNA, herein designated VGAM RNA, may have a different number of host target binding sites in untranslated regions of a VGAM299 host target RNA, herein designated VGAM HOST TARGET RNA. It is further appreciated that while FIG. 1 depicts host target binding sites in the 3UTR region, this is meant as an example only these host target binding sites may be located in the 3UTR region, the 5UTR region, or in both 3UTR and 5UTR regions.

[4147] The complementary binding of VGAM299 RNA, herein designated VGAM RNA, to host target binding sites on VGAM299 host target RNA, herein designated VGAM HOST TARGET RNA, such as BINDING SITE I, BINDING SITE II and BINDING SITE III, inhibits translation of VGAM299 host target RNA, herein designated VGAM HOST TARGET RNA, into VGAM299 host target protein, herein designated VGAM HOST TARGET PROTEIN. VGAM host target protein is therefore outlined by a broken line.

[4148] It is appreciated that VGAM299 host target gene, herein designated VGAM HOST TARGET GENE, in fact represents a plurality of VGAM299 host target genes. The mRNA of each one of this plurality of VGAM299 host target genes comprises one or more host target binding sites, each having a nucleotide sequence which is at least partly complementary to VGAM299 RNA, herein designated VGAM RNA, and which when bound by VGAM299 RNA, herein designated VGAM RNA, causes inhibition of translation of respective one or more VGAM299 host target proteins.

[4149] It is further appreciated by one skilled in the art that the mode of translational inhibition illustrated by FIG. 1 with specific reference to translational inhibition exerted by VGAM299 gene, herein designated VGAM GENE, on one or more VGAM299 host target gene, herein designated VGAM HOST TARGET GENE, is in fact common to other known non-viral miRNA genes. As mentioned hereinabove with reference to the background section, although a specific complementary binding site has been demonstrated only for some of the known miRNA genes (primarily Lin-4 and Let-7), all other recently discovered miRNA genes are also believed by those skilled in the art to modulate expression of other genes by complementary binding, although specific complementary binding sites of these other miRNA genes have not yet been found (Ruvkun G., Perspective: Glimpses of a tiny RNA world, Science 294, 779 (2001)).

[4150] It is yet further appreciated that a function of VGAM299 is inhibition of expression of host target genes, as part of a novel viral mechanism of attacking a host. Accordingly, utilities of VGAM299 include diagnosis, prevention and treatment of viral infection by Vaccinia virus. Specific functions, and accordingly utilities, of VGAM299 correlate with, and may be deduced from, the identity of the host target genes which VGAM299 binds and inhibits, and the function of these host target genes, as elaborated hereinbelow.

[4151] Nucleotide sequences of the VGAM299 precursor RNA, herein designated VGAM PRECURSOR RNA, and of the diced VGAM299 RNA, herein designated VGAM RNA, and a schematic representation of the secondary folding of VGAM299 folded precursor RNA, herein designated VGAM FOLDED PRECURSOR RNA, of VGAM299 are further described hereinbelow with reference to Table 1.

[4152] Nucleotide sequences of host target binding sites, such as BINDING SITE-I, BINDING SITE-II and BINDING SITE-III of FIG. 1, found on, and schematic representation of the complementarity of each of these host target binding sites to VGAM299 RNA, herein designated VGAM RNA, are described hereinbelow with reference to Table 2.

[4153] FIG. 1 further provides a conceptual description of another novel bioinformatically detected viral gene of the present invention, referred to here as Viral Genomic Address Messenger 300 (VGAM300) viral gene, which modulates expression of respective host target genes thereof, the function and utility of which host target genes is known in the art.

[4154] VGAM300 is a novel bioinformatically detected regulatory, non protein coding, viral micro RNA (miRNA) gene. The method by which VGAM300 was detected is described hereinabove with reference to FIGS. 2-8.

[4155] VGAM300 gene, herein designated VGAM GENE, is a viral gene contained in the genome of Vaccinia virus. VGAM300 host target gene, herein designated VGAM HOST TARGET GENE, is a human gene contained in the human genome.

[4156] VGAM300 gene, herein designated VGAM GENE, encodes a VGAM300 precursor RNA, herein designated VGAM PRECURSOR RNA. Similar to other miRNA genes, and unlike most ordinary genes, VGAM300 precursor RNA, herein designated VGAM PRECURSOR RNA, does not encode a protein. A nucleotide sequence identical or highly similar to the nucleotide sequence of VGAM300 precursor RNA is designated SEQ ID:286, and is provided hereinbelow with reference to the sequence listing part. Nucleotide sequence SEQ ID:286 is located at position 172477 relative to the genome of Vaccinia virus.

[4157] VGAM300 precursor RNA, herein designated VGAM PRECURSOR RNA, folds onto itself, forming VGAM300 folded precursor RNA, herein designated VGAM FOLDED PRECURSOR RNA, which has a two-dimensional hairpin structure. As is well known in the art, this hairpin structure, is typical of RNA encoded by miRNA genes, and is due to the fact that the nucleotide sequence of the first half of the RNA encoded by a miRNA gene is an accurate or partial inversed-reversed sequence of the nucleotide sequence of the second half thereof.

[4158] An enzyme complex designated DICER COMPLEX, dices the VGAM300 folded precursor RNA, herein designated VGAM FOLDED PRECURSOR RNA, into VGAM300 RNA, herein designated VGAM RNA, a single stranded ˜22 nt long RNA segment. As is known in the art, dicing of a hairpin structured RNA precursor product into a short ˜22 nt RNA segment is catalyzed by an enzyme complex comprising an enzyme called Dicer together with other necessary proteins. A probable (over 84%) nucleotide sequence of VGAM300 RNA is designated SEQ ID:635, and is provided hereinbelow with reference to the sequence listing part.

[4159] VGAM300 host target gene, herein designated VGAM HOST TARGET GENE, encodes a corresponding messenger RNA, VGAM300 host target RNA, herein designated VGAM HOST TARGET RNA. VGAM300 host target RNA, herein designated VGAM HOST TARGET RNA, comprises three regions, as is typical of mRNA of a protein coding gene: a 5 untranslated region, a protein coding region and a 3 untranslated region, designated 5UTR, PROTEIN CODING and 3UTR respectively.

[4160] VGAM300 RNA, herein designated VGAM RNA, binds complementarily to one or more host target binding sites located in untranslated regions of VGAM300 host target RNA, herein designated VGAM HOST TARGET RNA. This complementary binding is due to the fact that the nucleotide sequence of VGAM300 RNA, herein designated VGAM RNA, is an accurate or a partial inversed-reversed sequence of the nucleotide sequence of each of the host target binding sites. As an illustration, FIG. 1 shows 3 such host target binding sites, designated BINDING SITE I, BINDING SITE II and BINDING SITE III respectively. It is appreciated that the number of host target binding sites shown in FIG. 1 is meant as an illustration only, and is not meant to be limiting VGAM300 RNA, herein designated VGAM RNA, may have a different number of host target binding sites in untranslated regions of a VGAM300 host target RNA, herein designated VGAM HOST TARGET RNA. It is further appreciated that while FIG. 1 depicts host target binding sites in the 3UTR region, this is meant as an example only these host target binding sites may be located in the 3UTR region, the 5UTR region, or in both 3UTR and 5UTR regions.

[4161] The complementary binding of VGAM300 RNA, herein designated VGAM RNA, to host target binding sites on VGAM300 host target RNA, herein designated VGAM HOST TARGET RNA, such as BINDING SITE I, BINDING SITE II and BINDING SITE III, inhibits translation of VGAM300 host target RNA, herein designated VGAM HOST TARGET RNA, into VGAM300 host target protein, herein designated VGAM HOST TARGET PROTEIN. VGAM host target protein is therefore outlined by a broken line.

[4162] It is appreciated that VGAM300 host target gene, herein designated VGAM HOST TARGET GENE, in fact represents a plurality of VGAM300 host target genes. The mRNA of each one of this plurality of VGAM300 host target genes comprises one or more host target binding sites, each having a nucleotide sequence which is at least partly complementary to VGAM300 RNA, herein designated VGAM RNA, and which when bound by VGAM300 RNA, herein designated VGAM RNA, causes inhibition of translation of respective one or more VGAM300 host target proteins.

[4163] It is further appreciated by one skilled in the art that the mode of translational inhibition illustrated by FIG. 1 with specific reference to translational inhibition exerted by VGAM300 gene, herein designated VGAM GENE, on one or more VGAM300 host target gene, herein designated VGAM HOST TARGET GENE, is in fact common to other known non-viral miRNA genes. As mentioned hereinabove with reference to the background section, although a specific complementary binding site has been demonstrated only for some of the known miRNA genes (primarily Lin-4 and Let-7), all other recently discovered miRNA genes are also believed by those skilled in the art to modulate expression of other genes by complementary binding, although specific complementary binding sites of these other miRNA genes have not yet been found (Ruvkun G., Perspective: Glimpses of a tiny RNA world, Science 294, 779 (2001)).

[4164] It is yet further appreciated that a function of VGAM300 is inhibition of expression of host target genes, as part of a novel viral mechanism of attacking a host. Accordingly, utilities of VGAM300 include diagnosis, prevention and treatment of viral infection by Vaccinia virus. Specific functions, and accordingly utilities, of VGAM300 correlate with, and may be deduced from, the identity of the host target genes which VGAM300 binds and inhibits, and the function of these host target genes, as elaborated hereinbelow.

[4165] Nucleotide sequences of the VGAM300 precursor RNA, herein designated VGAM PRECURSOR RNA, and of the diced VGAM300 RNA, herein designated VGAM RNA, and a schematic representation of the secondary folding of VGAM300 folded precursor RNA, herein designated VGAM FOLDED PRECURSOR RNA, of VGAM300 are further described hereinbelow with reference to Table 1.

[4166] Nucleotide sequences of host target binding sites, such as BINDING SITE-I, BINDING SITE-II and BINDING SITE-III of FIG. 1, found on, and schematic representation of the complementarity of each of these host target binding sites to VGAM300 RNA, herein designated VGAM RNA, are described hereinbelow with reference to Table 2.

[4167] FIG. 1 further provides a conceptual description of another novel bioinformatically detected viral gene of the present invention, referred to here as Viral Genomic Address Messenger 301 (VGAM301) viral gene, which modulates expression of respective host target genes thereof, the function and utility of which host target genes is known in the art.

[4168] VGAM301 is a novel bioinformatically detected regulatory, non protein coding, viral micro RNA (miRNA) gene. The method by which VGAM301 was detected is described hereinabove with reference to FIGS. 2-8.

[4169] VGAM301 gene, herein designated VGAM GENE, is a viral gene contained in the genome of Vaccinia virus. VGAM301 host target gene, herein designated VGAM HOST TARGET GENE, is a human gene contained in the human genome.

[4170] VGAM301 gene, herein designated VGAM GENE, encodes a VGAM301 precursor RNA, herein designated VGAM PRECURSOR RNA. Similar to other miRNA genes, and unlike most ordinary genes, VGAM301 precursor RNA, herein designated VGAM PRECURSOR RNA, does not encode a protein. A nucleotide sequence identical or highly similar to the nucleotide sequence of VGAM301 precursor RNA is designated SEQ ID:287, and is provided hereinbelow with reference to the sequence listing part. Nucleotide sequence SEQ ID:287 is located at position 174245 relative to the genome of Vaccinia virus.

[4171] VGAM301 precursor RNA, herein designated VGAM PRECURSOR RNA, folds onto itself, forming VGAM301 folded precursor RNA, herein designated VGAM FOLDED PRECURSOR RNA, which has a two-dimensional hairpin structure. As is well known in the art, this hairpin structure, is typical of RNA encoded by miRNA genes, and is due to the fact that the nucleotide sequence of the first half of the RNA encoded by a miRNA gene is an accurate or partial inversed-reversed sequence of the nucleotide sequence of the second half thereof.

[4172] An enzyme complex designated DICER COMPLEX, dices the VGAM301 folded precursor RNA, herein designated VGAM FOLDED PRECURSOR RNA, into VGAM301 RNA, herein designated VGAM RNA, a single stranded ˜22 nt long RNA segment. As is known in the art, dicing of a hairpin structured RNA precursor product into a short ˜22 nt RNA segment is catalyzed by an enzyme complex comprising an enzyme called Dicer together with other necessary proteins. A probable (over 72%) nucleotide sequence of VGAM301 RNA is designated SEQ ID:636, and is provided hereinbelow with reference to the sequence listing part.

[4173] VGAM301 host target gene, herein designated VGAM HOST TARGET GENE, encodes a corresponding messenger RNA, VGAM301 host target RNA, herein designated VGAM HOST TARGET RNA. VGAM301 host target RNA, herein designated VGAM HOST TARGET RNA, comprises three regions, as is typical of mRNA of a protein coding gene: a 5 untranslated region, a protein coding region and a 3 untranslated region, designated 5UTR, PROTEIN CODING and 3UTR respectively.

[4174] VGAM301 RNA, herein designated VGAM RNA, binds complementarily to one or more host target binding sites located in untranslated regions of VGAM301 host target RNA, herein designated VGAM HOST TARGET RNA. This complementary binding is due to the fact that the nucleotide sequence of VGAM301 RNA, herein designated VGAM RNA, is an accurate or a partial inversed-reversed sequence of the nucleotide sequence of each of the host target binding sites. As an illustration, FIG. 1 shows 3 such host target binding sites, designated BINDING SITE I, BINDING SITE II and BINDING SITE III respectively. It is appreciated that the number of host target binding sites shown in FIG. 1 is meant as an illustration only, and is not meant to be limiting VGAM301 RNA, herein designated VGAM RNA, may have a different number of host target binding sites in untranslated regions of a VGAM301 host target RNA, herein designated VGAM HOST TARGET RNA. It is further appreciated that while FIG. 1 depicts host target binding sites in the 3UTR region, this is meant as an example only these host target binding sites may be located in the 3UTR region, the 5UTR region, or in both 3UTR and 5UTR regions.

[4175] The complementary binding of VGAM301 RNA, herein designated VGAM RNA, to host target binding sites on VGAM301 host target RNA, herein designated VGAM HOST TARGET RNA, such as BINDING SITE I, BINDING SITE II and BINDING SITE III, inhibits translation of VGAM301 host target RNA, herein designated VGAM HOST TARGET RNA, into VGAM301 host target protein, herein designated VGAM HOST TARGET PROTEIN. VGAM host target protein is therefore outlined by a broken line.

[4176] It is appreciated that VGAM301 host target gene, herein designated VGAM HOST TARGET GENE, in fact represents a plurality of VGAM301 host target genes. The mRNA of each one of this plurality of VGAM301 host target genes comprises one or more host target binding sites, each having a nucleotide sequence which is at least partly complementary to VGAM301 RNA, herein designated VGAM RNA, and which when bound by VGAM301 RNA, herein designated VGAM RNA, causes inhibition of translation of respective one or more VGAM301 host target proteins.

[4177] It is further appreciated by one skilled in the art that the mode of translational inhibition illustrated by FIG. 1 with specific reference to translational inhibition exerted by VGAM301 gene, herein designated VGAM GENE, on one or more VGAM301 host target gene, herein designated VGAM HOST TARGET GENE, is in fact common to other known non-viral miRNA genes. As mentioned hereinabove with reference to the background section, although a specific complementary binding site has been demonstrated only for some of the known miRNA genes (primarily Lin-4 and Let-7), all other recently discovered miRNA genes are also believed by those skilled in the art to modulate expression of other genes by complementary binding, although specific complementary binding sites of these other miRNA genes have not yet been found (Ruvkun G., Perspective: Glimpses of a tiny RNA world, Science 294, 779 (2001)).

[4178] It is yet further appreciated that a function of VGAM301 is inhibition of expression of host target genes, as part of a novel viral mechanism of attacking a host. Accordingly, utilities of VGAM301 include diagnosis, prevention and treatment of viral infection by Vaccinia virus. Specific functions, and accordingly utilities, of VGAM301 correlate with, and may be deduced from, the identity of the host target genes which VGAM301 binds and inhibits, and the function of these host target genes, as elaborated hereinbelow.

[4179] Nucleotide sequences of the VGAM301 precursor RNA, herein designated VGAM PRECURSOR RNA, and of the diced VGAM301 RNA, herein designated VGAM RNA, and a schematic representation of the secondary folding of VGAM301 folded precursor RNA, herein designated VGAM FOLDED PRECURSOR RNA, of VGAM301 are further described hereinbelow with reference to Table 1.

[4180] Nucleotide sequences of host target binding sites, such as BINDING SITE-I, BINDING SITE-II and BINDING SITE-III of FIG. 1, found on, and schematic representation of the complementarity of each of these host target binding sites to VGAM301 RNA, herein designated VGAM RNA, are described hereinbelow with reference to Table 2.

[4181] FIG. 1 further provides a conceptual description of another novel bioinformatically detected viral gene of the present invention, referred to here as Viral Genomic Address Messenger 302 (VGAM302) viral gene, which modulates expression of respective host target genes thereof, the function and utility of which host target genes is known in the art.

[4182] VGAM302 is a novel bioinformatically detected regulatory, non protein coding, viral micro RNA (miRNA) gene. The method by which VGAM302 was detected is described hereinabove with reference to FIGS. 2-8.

[4183] VGAM302 gene, herein designated VGAM GENE, is a viral gene contained in the genome of Vaccinia virus. VGAM302 host target gene, herein designated VGAM HOST TARGET GENE, is a human gene contained in the human genome.

[4184] VGAM302 gene, herein designated VGAM GENE, encodes a VGAM302 precursor RNA, herein designated VGAM PRECURSOR RNA. Similar to other miRNA genes, and unlike most ordinary genes, VGAM302 precursor RNA, herein designated VGAM PRECURSOR RNA, does not encode a protein. A nucleotide sequence identical or highly similar to the nucleotide sequence of VGAM302 precursor RNA is designated SEQ ID:288, and is provided hereinbelow with reference to the sequence listing part. Nucleotide sequence SEQ ID:288 is located at position 175500 relative to the genome of Vaccinia virus.

[4185] VGAM302 precursor RNA, herein designated VGAM PRECURSOR RNA, folds onto itself, forming VGAM302 folded precursor RNA, herein designated VGAM FOLDED PRECURSOR RNA, which has a two-dimensional hairpin structure. As is well known in the art, this hairpin structure, is typical of RNA encoded by miRNA genes, and is due to the fact that the nucleotide sequence of the first half of the RNA encoded by a miRNA gene is an accurate or partial inversed-reversed sequence of the nucleotide sequence of the second half thereof.

[4186] An enzyme complex designated DICER COMPLEX, dices the VGAM302 folded precursor RNA, herein designated VGAM FOLDED PRECURSOR RNA, into VGAM302 RNA, herein designated VGAM RNA, a single stranded ˜22 nt long RNA segment. As is known in the art, dicing of a hairpin structured RNA precursor product into a short ˜22 nt RNA segment is catalyzed by an enzyme complex comprising an enzyme called Dicer together with other necessary proteins. A probable (over 74%) nucleotide sequence of VGAM302 RNA is designated SEQ ID:637, and is provided hereinbelow with reference to the sequence listing part.

[4187] VGAM302 host target gene, herein designated VGAM HOST TARGET GENE, encodes a corresponding messenger RNA, VGAM302 host target RNA, herein designated VGAM HOST TARGET RNA. VGAM302 host target RNA, herein designated VGAM HOST TARGET RNA, comprises three regions, as is typical of mRNA of a protein coding gene: a 5 untranslated region, a protein coding region and a 3 untranslated region, designated 5UTR, PROTEIN CODING and 3UTR respectively.

[4188] VGAM302 RNA, herein designated VGAM RNA, binds complementarily to one or more host target binding sites located in untranslated regions of VGAM302 host target RNA, herein designated VGAM HOST TARGET RNA. This complementary binding is due to the fact that the nucleotide sequence of VGAM302 RNA, herein designated VGAM RNA, is an accurate or a partial inversed-reversed sequence of the nucleotide sequence of each of the host target binding sites. As an illustration, FIG. 1 shows 3 such host target binding sites, designated BINDING SITE I, BINDING SITE II and BINDING SITE III respectively. It is appreciated that the number of host target binding sites shown in FIG. 1 is meant as an illustration only, and is not meant to be limiting VGAM302 RNA, herein designated VGAM RNA, may have a different number of host target binding sites in untranslated regions of a VGAM302 host target RNA, herein designated VGAM HOST TARGET RNA. It is further appreciated that while FIG. 1 depicts host target binding sites in the 3UTR region, this is meant as an example only these host target binding sites may be located in the 3UTR region, the 5UTR region, or in both 3UTR and 5UTR regions.

[4189] The complementary binding of VGAM302 RNA, herein designated VGAM RNA, to host target binding sites on VGAM302 host target RNA, herein designated VGAM HOST TARGET RNA, such as BINDING SITE I, BINDING SITE II and BINDING SITE III, inhibits translation of VGAM302 host target RNA, herein designated VGAM HOST TARGET RNA, into VGAM302 host target protein, herein designated VGAM HOST TARGET PROTEIN. VGAM host target protein is therefore outlined by a broken line.

[4190] It is appreciated that VGAM302 host target gene, herein designated VGAM HOST TARGET GENE, in fact represents a plurality of VGAM302 host target genes. The mRNA of each one of this plurality of VGAM302 host target genes comprises one or more host target binding sites, each having a nucleotide sequence which is at least partly complementary to VGAM302 RNA, herein designated VGAM RNA, and which when bound by VGAM302 RNA, herein designated VGAM RNA, causes inhibition of translation of respective one or more VGAM302 host target proteins.

[4191] It is further appreciated by one skilled in the art that the mode of translational inhibition illustrated by FIG. 1 with specific reference to translational inhibition exerted by VGAM302 gene, herein designated VGAM GENE, on one or more VGAM302 host target gene, herein designated VGAM HOST TARGET GENE, is in fact common to other known non-viral miRNA genes. As mentioned hereinabove with reference to the background section, although a specific complementary binding site has been demonstrated only for some of the known miRNA genes (primarily Lin-4 and Let-7), all other recently discovered miRNA genes are also believed by those skilled in the art to modulate expression of other genes by complementary binding, although specific complementary binding sites of these other miRNA genes have not yet been found (Ruvkun G., Perspective: Glimpses of a tiny RNA world, Science 294, 779 (2001)).

[4192] It is yet further appreciated that a function of VGAM302 is inhibition of expression of host target genes, as part of a novel viral mechanism of attacking a host. Accordingly, utilities of VGAM302 include diagnosis, prevention and treatment of viral infection by Vaccinia virus. Specific functions, and accordingly utilities, of VGAM302 correlate with, and may be deduced from, the identity of the host target genes which VGAM302 binds and inhibits, and the function of these host target genes, as elaborated hereinbelow.

[4193] Nucleotide sequences of the VGAM302 precursor RNA, herein designated VGAM PRECURSOR RNA, and of the diced VGAM302 RNA, herein designated VGAM RNA, and a schematic representation of the secondary folding of VGAM302 folded precursor RNA, herein designated VGAM FOLDED PRECURSOR RNA, of VGAM302 are further described hereinbelow with reference to Table 1.

[4194] Nucleotide sequences of host target binding sites, such as BINDING SITE-I, BINDING SITE-II and BINDING SITE-III of FIG. 1, found on, and schematic representation of the complementarity of each of these host target binding sites to VGAM302 RNA, herein designated VGAM RNA, are described hereinbelow with reference to Table 2.

[4195] FIG. 1 further provides a conceptual description of another novel bioinformatically detected viral gene of the present invention, referred to here as Viral Genomic Address Messenger 303 (VGAM303) viral gene, which modulates expression of respective host target genes thereof, the function and utility of which host target genes is known in the art.

[4196] VGAM303 is a novel bioinformatically detected regulatory, non protein coding, viral micro RNA (miRNA) gene. The method by which VGAM303 was detected is described hereinabove with reference to FIGS. 2-8.

[4197] VGAM303 gene, herein designated VGAM GENE, is a viral gene contained in the genome of Vaccinia virus. VGAM303 host target gene, herein designated VGAM HOST TARGET GENE, is a human gene contained in the human genome.

[4198] VGAM303 gene, herein designated VGAM GENE, encodes a VGAM303 precursor RNA, herein designated VGAM PRECURSOR RNA. Similar to other miRNA genes, and unlike most ordinary genes, VGAM303 precursor RNA, herein designated VGAM PRECURSOR RNA, does not encode a protein. A nucleotide sequence identical or highly similar to the nucleotide sequence of VGAM303 precursor RNA is designated SEQ ID:289, and is provided hereinbelow with reference to the sequence listing part. Nucleotide sequence SEQ ID:289 is located at position 9636 relative to the genome of Vaccinia virus.

[4199] VGAM303 precursor RNA, herein designated VGAM PRECURSOR RNA, folds onto itself, forming VGAM303 folded precursor RNA, herein designated VGAM FOLDED PRECURSOR RNA, which has a two-dimensional hairpin structure. As is well known in the art, this hairpin structure, is typical of RNA encoded by miRNA genes, and is due to the fact that the nucleotide sequence of the first half of the RNA encoded by a miRNA gene is an accurate or partial inversed-reversed sequence of the nucleotide sequence of the second half thereof.

[4200] An enzyme complex designated DICER COMPLEX, dices the VGAM303 folded precursor RNA, herein designated VGAM FOLDED PRECURSOR RNA, into VGAM303 RNA, herein designated VGAM RNA, a single stranded ˜22 nt long RNA segment. As is known in the art, dicing of a hairpin structured RNA precursor product into a short ˜22 nt RNA segment is catalyzed by an enzyme complex comprising an enzyme called Dicer together with other necessary proteins. A probable (over 71%) nucleotide sequence of VGAM303 RNA is designated SEQ ID:638, and is provided hereinbelow with reference to the sequence listing part.

[4201] VGAM303 host target gene, herein designated VGAM HOST TARGET GENE, encodes a corresponding messenger RNA, VGAM303 host target RNA, herein designated VGAM HOST TARGET RNA. VGAM303 host target RNA, herein designated VGAM HOST TARGET RNA, comprises three regions, as is typical of mRNA of a protein coding gene: a 5 untranslated region, a protein coding region and a 3 untranslated region, designated 5UTR, PROTEIN CODING and 3UTR respectively.

[4202] VGAM303 RNA, herein designated VGAM RNA, binds complementarily to one or more host target binding sites located in untranslated regions of VGAM303 host target RNA, herein designated VGAM HOST TARGET RNA. This complementary binding is due to the fact that the nucleotide sequence of VGAM303 RNA, herein designated VGAM RNA, is an accurate or a partial inversed-reversed sequence of the nucleotide sequence of each of the host target binding sites. As an illustration, FIG. 1 shows 3 such host target binding sites, designated BINDING SITE I, BINDING SITE II and BINDING SITE III respectively. It is appreciated that the number of host target binding sites shown in FIG. 1 is meant as an illustration only, and is not meant to be limiting VGAM303 RNA, herein designated VGAM RNA, may have a different number of host target binding sites in untranslated regions of a VGAM303 host target RNA, herein designated VGAM HOST TARGET RNA. It is further appreciated that while FIG. 1 depicts host target binding sites in the 3UTR region, this is meant as an example only these host target binding sites may be located in the 3UTR region, the 5UTR region, or in both 3UTR and 5UTR regions.

[4203] The complementary binding of VGAM303 RNA, herein designated VGAM RNA, to host target binding sites on VGAM303 host target RNA, herein designated VGAM HOST TARGET RNA, such as BINDING SITE I, BINDING SITE II and BINDING SITE III, inhibits translation of VGAM303 host target RNA, herein designated VGAM HOST TARGET RNA, into VGAM303 host target protein, herein designated VGAM HOST TARGET PROTEIN. VGAM host target protein is therefore outlined by a broken line.

[4204] It is appreciated that VGAM303 host target gene, herein designated VGAM HOST TARGET GENE, in fact represents a plurality of VGAM303 host target genes. The mRNA of each one of this plurality of VGAM303 host target genes comprises one or more host target binding sites, each having a nucleotide sequence which is at least partly complementary to VGAM303 RNA, herein designated VGAM RNA, and which when bound by VGAM303 RNA, herein designated VGAM RNA, causes inhibition of translation of respective one or more VGAM303 host target proteins.

[4205] It is further appreciated by one skilled in the art that the mode of translational inhibition illustrated by FIG. 1 with specific reference to translational inhibition exerted by VGAM303 gene, herein designated VGAM GENE, on one or more VGAM303 host target gene, herein designated VGAM HOST TARGET GENE, is in fact common to other known non-viral miRNA genes. As mentioned hereinabove with reference to the background section, although a specific complementary binding site has been demonstrated only for some of the known miRNA genes (primarily Lin-4 and Let-7), all other recently discovered miRNA genes are also believed by those skilled in the art to modulate expression of other genes by complementary binding, although specific complementary binding sites of these other miRNA genes have not yet been found (Ruvkun G., Perspective: Glimpses of a tiny RNA world, Science 294, 779 (2001)).

[4206] It is yet further appreciated that a function of VGAM303 is inhibition of expression of host target genes, as part of a novel viral mechanism of attacking a host. Accordingly, utilities of VGAM303 include diagnosis, prevention and treatment of viral infection by Vaccinia virus. Specific functions, and accordingly utilities, of VGAM303 correlate with, and may be deduced from, the identity of the host target genes which VGAM303 binds and inhibits, and the function of these host target genes, as elaborated hereinbelow.

[4207] Nucleotide sequences of the VGAM303 precursor RNA, herein designated VGAM PRECURSOR RNA, and of the diced VGAM303 RNA, herein designated VGAM RNA, and a schematic representation of the secondary folding of VGAM303 folded precursor RNA, herein designated VGAM FOLDED PRECURSOR RNA, of VGAM303 are further described hereinbelow with reference to Table 1.

[4208] Nucleotide sequences of host target binding sites, such as BINDING SITE-I, BINDING SITE-II and BINDING SITE-III of FIG. 1, found on, and schematic representation of the complementarity of each of these host target binding sites to VGAM303 RNA, herein designated VGAM RNA, are described hereinbelow with reference to Table 2.

[4209] FIG. 1 further provides a conceptual description of another novel bioinformatically detected viral gene of the present invention, referred to here as Viral Genomic Address Messenger 304 (VGAM304) viral gene, which modulates expression of respective host target genes thereof, the function and utility of which host target genes is known in the art.

[4210] VGAM304 is a novel bioinformatically detected regulatory, non protein coding, viral micro RNA (miRNA) gene. The method by which VGAM304 was detected is described hereinabove with reference to FIGS. 2-8.

[4211] VGAM304 gene, herein designated VGAM GENE, is a viral gene contained in the genome of Vaccinia virus. VGAM304 host target gene, herein designated VGAM HOST TARGET GENE, is a human gene contained in the human genome.

[4212] VGAM304 gene, herein designated VGAM GENE, encodes a VGAM304 precursor RNA, herein designated VGAM PRECURSOR RNA. Similar to other miRNA genes, and unlike most ordinary genes, VGAM304 precursor RNA, herein designated VGAM PRECURSOR RNA, does not encode a protein. A nucleotide sequence identical or highly similar to the nucleotide sequence of VGAM304 precursor RNA is designated SEQ ID:290, and is provided hereinbelow with reference to the sequence listing part. Nucleotide sequence SEQ ID:290 is located at position 179183 relative to the genome of Vaccinia virus.

[4213] VGAM304 precursor RNA, herein designated VGAM PRECURSOR RNA, folds onto itself, forming VGAM304 folded precursor RNA, herein designated VGAM FOLDED PRECURSOR RNA, which has a two-dimensional hairpin structure. As is well known in the art, this hairpin structure, is typical of RNA encoded by miRNA genes, and is due to the fact that the nucleotide sequence of the first half of the RNA encoded by a miRNA gene is an accurate or partial inversed-reversed sequence of the nucleotide sequence of the second half thereof.

[4214] An enzyme complex designated DICER COMPLEX, dices the VGAM304 folded precursor RNA, herein designated VGAM FOLDED PRECURSOR RNA, into VGAM304 RNA, herein designated VGAM RNA, a single stranded ˜22 nt long RNA segment. As is known in the art, dicing of a hairpin structured RNA precursor product into a short ˜22 nt RNA segment is catalyzed by an enzyme complex comprising an enzyme called Dicer together with other necessary proteins. A probable (over 87%) nucleotide sequence of VGAM304 RNA is designated SEQ ID:639, and is provided hereinbelow with reference to the sequence listing part.

[4215] VGAM304 host target gene, herein designated VGAM HOST TARGET GENE, encodes a corresponding messenger RNA, VGAM304 host target RNA, herein designated VGAM HOST TARGET RNA. VGAM304 host target RNA, herein designated VGAM HOST TARGET RNA, comprises three regions, as is typical of mRNA of a protein coding gene: a 5 untranslated region, a protein coding region and a 3 untranslated region, designated 5UTR, PROTEIN CODING and 3UTR respectively.

[4216] VGAM304 RNA, herein designated VGAM RNA, binds complementarily to one or more host target binding sites located in untranslated regions of VGAM304 host target RNA, herein designated VGAM HOST TARGET RNA. This complementary binding is due to the fact that the nucleotide sequence of VGAM304 RNA, herein designated VGAM RNA, is an accurate or a partial inversed-reversed sequence of the nucleotide sequence of each of the host target binding sites. As an illustration, FIG. 1 shows 3 such host target binding sites, designated BINDING SITE I, BINDING SITE II and BINDING SITE III respectively. It is appreciated that the number of host target binding sites shown in FIG. 1 is meant as an illustration only, and is not meant to be limiting VGAM304 RNA, herein designated VGAM RNA, may have a different number of host target binding sites in untranslated regions of a VGAM304 host target RNA, herein designated VGAM HOST TARGET RNA. It is further appreciated that while FIG. 1 depicts host target binding sites in the 3UTR region, this is meant as an example only these host target binding sites may be located in the 3UTR region, the 5UTR region, or in both 3UTR and 5UTR regions.

[4217] The complementary binding of VGAM304 RNA, herein designated VGAM RNA, to host target binding sites on VGAM304 host target RNA, herein designated VGAM HOST TARGET RNA, such as BINDING SITE I, BINDING SITE II and BINDING SITE III, inhibits translation of VGAM304 host target RNA, herein designated VGAM HOST TARGET RNA, into VGAM304 host target protein, herein designated VGAM HOST TARGET PROTEIN. VGAM host target protein is therefore outlined by a broken line.

[4218] It is appreciated that VGAM304 host target gene, herein designated VGAM HOST TARGET GENE, in fact represents a plurality of VGAM304 host target genes. The mRNA of each one of this plurality of VGAM304 host target genes comprises one or more host target binding sites, each having a nucleotide sequence which is at least partly complementary to VGAM304 RNA, herein designated VGAM RNA, and which when bound by VGAM304 RNA, herein designated VGAM RNA, causes inhibition of translation of respective one or more VGAM304 host target proteins.

[4219] It is further appreciated by one skilled in the art that the mode of translational inhibition illustrated by FIG. 1 with specific reference to translational inhibition exerted by VGAM304 gene, herein designated VGAM GENE, on one or more VGAM304 host target gene, herein designated VGAM HOST TARGET GENE, is in fact common to other known non-viral miRNA genes. As mentioned hereinabove with reference to the background section, although a specific complementary binding site has been demonstrated only for some of the known miRNA genes (primarily Lin-4 and Let-7), all other recently discovered miRNA genes are also believed by those skilled in the art to modulate expression of other genes by complementary binding, although specific complementary binding sites of these other miRNA genes have not yet been found (Ruvkun G., Perspective: Glimpses of a tiny RNA world, Science 294, 779 (2001)).

[4220] It is yet further appreciated that a function of VGAM304 is inhibition of expression of host target genes, as part of a novel viral mechanism of attacking a host. Accordingly, utilities of VGAM304 include diagnosis, prevention and treatment of viral infection by Vaccinia virus. Specific functions, and accordingly utilities, of VGAM304 correlate with, and may be deduced from, the identity of the host target genes which VGAM304 binds and inhibits, and the function of these host target genes, as elaborated hereinbelow.

[4221] Nucleotide sequences of the VGAM304 precursor RNA, herein designated VGAM PRECURSOR RNA, and of the diced VGAM304 RNA, herein designated VGAM RNA, and a schematic representation of the secondary folding of VGAM304 folded precursor RNA, herein designated VGAM FOLDED PRECURSOR RNA, of VGAM304 are further described hereinbelow with reference to Table 1.

[4222] Nucleotide sequences of host target binding sites, such as BINDING SITE-I, BINDING SITE-II and BINDING SITE-III of FIG. 1, found on, and schematic representation of the complementarity of each of these host target binding sites to VGAM304 RNA, herein designated VGAM RNA, are described hereinbelow with reference to Table 2.

[4223] FIG. 1 further provides a conceptual description of another novel bioinformatically detected viral gene of the present invention, referred to here as Viral Genomic Address Messenger 305 (VGAM305) viral gene, which modulates expression of respective host target genes thereof, the function and utility of which host target genes is known in the art.

[4224] VGAM305 is a novel bioinformatically detected regulatory, non protein coding, viral micro RNA (miRNA) gene. The method by which VGAM305 was detected is described hereinabove with reference to FIGS. 2-8.

[4225] VGAM305 gene, herein designated VGAM GENE, is a viral gene contained in the genome of Vaccinia virus. VGAM305 host target gene, herein designated VGAM HOST TARGET GENE, is a human gene contained in the human genome.

[4226] VGAM305 gene, herein designated VGAM GENE, encodes a VGAM305 precursor RNA, herein designated VGAM PRECURSOR RNA. Similar to other miRNA genes, and unlike most ordinary genes, VGAM305 precursor RNA, herein designated VGAM PRECURSOR RNA, does not encode a protein. A nucleotide sequence identical or highly similar to the nucleotide sequence of VGAM305 precursor RNA is designated SEQ ID:291, and is provided hereinbelow with reference to the sequence listing part. Nucleotide sequence SEQ ID:291 is located at position 179295 relative to the genome of Vaccinia virus.

[4227] VGAM305 precursor RNA, herein designated VGAM PRECURSOR RNA, folds onto itself, forming VGAM305 folded precursor RNA, herein designated VGAM FOLDED PRECURSOR RNA, which has a two-dimensional hairpin structure. As is well known in the art, this hairpin structure, is typical of RNA encoded by miRNA genes, and is due to the fact that the nucleotide sequence of the first half of the RNA encoded by a miRNA gene is an accurate or partial inversed-reversed sequence of the nucleotide sequence of the second half thereof.

[4228] An enzyme complex designated DICER COMPLEX, dices the VGAM305 folded precursor RNA, herein designated VGAM FOLDED PRECURSOR RNA, into VGAM305 RNA, herein designated VGAM RNA, a single stranded ˜22 nt long RNA segment. As is known in the art, dicing of a hairpin structured RNA precursor product into a short ˜22 nt RNA segment is catalyzed by an enzyme complex comprising an enzyme called Dicer together with other necessary proteins. A probable (over 73%) nucleotide sequence of VGAM305 RNA is designated SEQ ID:640, and is provided hereinbelow with reference to the sequence listing part.

[4229] VGAM305 host target gene, herein designated VGAM HOST TARGET GENE, encodes a corresponding messenger RNA, VGAM305 host target RNA, herein designated VGAM HOST TARGET RNA. VGAM305 host target RNA, herein designated VGAM HOST TARGET RNA, comprises three regions, as is typical of mRNA of a protein coding gene: a 5 untranslated region, a protein coding region and a 3 untranslated region, designated 5UTR, PROTEIN CODING and 3UTR respectively.

[4230] VGAM305 RNA, herein designated VGAM RNA, binds complementarily to one or more host target binding sites located in untranslated regions of VGAM305 host target RNA, herein designated VGAM HOST TARGET RNA. This complementary binding is due to the fact that the nucleotide sequence of VGAM305 RNA, herein designated VGAM RNA, is an accurate or a partial inversed-reversed sequence of the nucleotide sequence of each of the host target binding sites. As an illustration, FIG. 1 shows 3 such host target binding sites, designated BINDING SITE I, BINDING SITE II and BINDING SITE III respectively. It is appreciated that the number of host target binding sites shown in FIG. 1 is meant as an illustration only, and is not meant to be limiting VGAM305 RNA, herein designated VGAM RNA, may have a different number of host target binding sites in untranslated regions of a VGAM305 host target RNA, herein designated VGAM HOST TARGET RNA. It is further appreciated that while FIG. 1 depicts host target binding sites in the 3UTR region, this is meant as an example only these host target binding sites may be located in the 3UTR region, the 5UTR region, or in both 3UTR and 5UTR regions.

[4231] The complementary binding of VGAM305 RNA, herein designated VGAM RNA, to host target binding sites on VGAM305 host target RNA, herein designated VGAM HOST TARGET RNA, such as BINDING SITE I, BINDING SITE II and BINDING SITE III, inhibits translation of VGAM305 host target RNA, herein designated VGAM HOST TARGET RNA, into VGAM305 host target protein, herein designated VGAM HOST TARGET PROTEIN. VGAM host target protein is therefore outlined by a broken line.

[4232] It is appreciated that VGAM305 host target gene, herein designated VGAM HOST TARGET GENE, in fact represents a plurality of VGAM305 host target genes. The mRNA of each one of this plurality of VGAM305 host target genes comprises one or more host target binding sites, each having a nucleotide sequence which is at least partly complementary to VGAM305 RNA, herein designated VGAM RNA, and which when bound by VGAM305 RNA, herein designated VGAM RNA, causes inhibition of translation of respective one or more VGAM305 host target proteins.

[4233] It is further appreciated by one skilled in the art that the mode of translational inhibition illustrated by FIG. 1 with specific reference to translational inhibition exerted by VGAM305 gene, herein designated VGAM GENE, on one or more VGAM305 host target gene, herein designated VGAM HOST TARGET GENE, is in fact common to other known non-viral miRNA genes. As mentioned hereinabove with reference to the background section, although a specific complementary binding site has been demonstrated only for some of the known miRNA genes (primarily Lin-4 and Let-7), all other recently discovered miRNA genes are also believed by those skilled in the art to modulate expression of other genes by complementary binding, although specific complementary binding sites of these other miRNA genes have not yet been found (Ruvkun G., Perspective: Glimpses of a tiny RNA world, Science 294, 779 (2001)).

[4234] It is yet further appreciated that a function of VGAM305 is inhibition of expression of host target genes, as part of a novel viral mechanism of attacking a host. Accordingly, utilities of VGAM305 include diagnosis, prevention and treatment of viral infection by Vaccinia virus. Specific functions, and accordingly utilities, of VGAM305 correlate with, and may be deduced from, the identity of the host target genes which VGAM305 binds and inhibits, and the function of these host target genes, as elaborated hereinbelow.

[4235] Nucleotide sequences of the VGAM305 precursor RNA, herein designated VGAM PRECURSOR RNA, and of the diced VGAM305 RNA, herein designated VGAM RNA, and a schematic representation of the secondary folding of VGAM305 folded precursor RNA, herein designated VGAM FOLDED PRECURSOR RNA, of VGAM305 are further described hereinbelow with reference to Table 1.

[4236] Nucleotide sequences of host target binding sites, such as BINDING SITE-I, BINDING SITE-II and BINDING SITE-III of FIG. 1, found on, and schematic representation of the complementarity of each of these host target binding sites to VGAM305 RNA, herein designated VGAM RNA, are described hereinbelow with reference to Table 2.

[4237] FIG. 1 further provides a conceptual description of another novel bioinformatically detected viral gene of the present invention, referred to here as Viral Genomic Address Messenger 306 (VGAM306) viral gene, which modulates expression of respective host target genes thereof, the function and utility of which host target genes is known in the art.

[4238] VGAM306 is a novel bioinformatically detected regulatory, non protein coding, viral micro RNA (miRNA) gene. The method by which VGAM306 was detected is described hereinabove with reference to FIGS. 2-8.

[4239] VGAM306 gene, herein designated VGAM GENE, is a viral gene contained in the genome of Vaccinia virus. VGAM306 host target gene, herein designated VGAM HOST TARGET GENE, is a human gene contained in the human genome.

[4240] VGAM306 gene, herein designated VGAM GENE, encodes a VGAM306 precursor RNA, herein designated VGAM PRECURSOR RNA. Similar to other miRNA genes, and unlike most ordinary genes, VGAM306 precursor RNA, herein designated VGAM PRECURSOR RNA, does not encode a protein. A nucleotide sequence identical or highly similar to the nucleotide sequence of VGAM306 precursor RNA is designated SEQ ID:292, and is provided hereinbelow with reference to the sequence listing part. Nucleotide sequence SEQ ID:292 is located at position 176521 relative to the genome of Vaccinia virus.

[4241] VGAM306 precursor RNA, herein designated VGAM PRECURSOR RNA, folds onto itself, forming VGAM306 folded precursor RNA, herein designated VGAM FOLDED PRECURSOR RNA, which has a two-dimensional hairpin structure. As is well known in the art, this hairpin structure, is typical of RNA encoded by miRNA genes, and is due to the fact that the nucleotide sequence of the first half of the RNA encoded by a miRNA gene is an accurate or partial inversed-reversed sequence of the nucleotide sequence of the second half thereof.

[4242] An enzyme complex designated DICER COMPLEX, dices the VGAM306 folded precursor RNA, herein designated VGAM FOLDED PRECURSOR RNA, into VGAM306 RNA, herein designated VGAM RNA, a single stranded ˜22 nt long RNA segment. As is known in the art, dicing of a hairpin structured RNA precursor product into a short ˜22 nt RNA segment is catalyzed by an enzyme complex comprising an enzyme called Dicer together with other necessary proteins. A probable (over 73%) nucleotide sequence of VGAM306 RNA is designated SEQ ID:641, and is provided hereinbelow with reference to the sequence listing part.

[4243] VGAM306 host target gene, herein designated VGAM HOST TARGET GENE, encodes a corresponding messenger RNA, VGAM306 host target RNA, herein designated VGAM HOST TARGET RNA. VGAM306 host target RNA, herein designated VGAM HOST TARGET RNA, comprises three regions, as is typical of mRNA of a protein coding gene: a 5 untranslated region, a protein coding region and a 3 untranslated region, designated 5UTR, PROTEIN CODING and 3UTR respectively.

[4244] VGAM306 RNA, herein designated VGAM RNA, binds complementarily to one or more host target binding sites located in untranslated regions of VGAM306 host target RNA, herein designated VGAM HOST TARGET RNA. This complementary binding is due to the fact that the nucleotide sequence of VGAM306 RNA, herein designated VGAM RNA, is an accurate or a partial inversed-reversed sequence of the nucleotide sequence of each of the host target binding sites. As an illustration, FIG. 1 shows 3 such host target binding sites, designated BINDING SITE I, BINDING SITE II and BINDING SITE III respectively. It is appreciated that the number of host target binding sites shown in FIG. 1 is meant as an illustration only, and is not meant to be limiting VGAM306 RNA, herein designated VGAM RNA, may have a different number of host target binding sites in untranslated regions of a VGAM306 host target RNA, herein designated VGAM HOST TARGET RNA. It is further appreciated that while FIG. 1 depicts host target binding sites in the 3UTR region, this is meant as an example only these host target binding sites may be located in the 3UTR region, the 5UTR region, or in both 3UTR and 5UTR regions.

[4245] The complementary binding of VGAM306 RNA, herein designated VGAM RNA, to host target binding sites on VGAM306 host target RNA, herein designated VGAM HOST TARGET RNA, such as BINDING SITE I, BINDING SITE II and BINDING SITE III, inhibits translation of VGAM306 host target RNA, herein designated VGAM HOST TARGET RNA, into VGAM306 host target protein, herein designated VGAM HOST TARGET PROTEIN. VGAM host target protein is therefore outlined by a broken line.

[4246] It is appreciated that VGAM306 host target gene, herein designated VGAM HOST TARGET GENE, in fact represents a plurality of VGAM306 host target genes. The mRNA of each one of this plurality of VGAM306 host target genes comprises one or more host target binding sites, each having a nucleotide sequence which is at least partly complementary to VGAM306 RNA, herein designated VGAM RNA, and which when bound by VGAM306 RNA, herein designated VGAM RNA, causes inhibition of translation of respective one or more VGAM306 host target proteins.

[4247] It is further appreciated by one skilled in the art that the mode of translational inhibition illustrated by FIG. 1 with specific reference to translational inhibition exerted by VGAM306 gene, herein designated VGAM GENE, on one or more VGAM306 host target gene, herein designated VGAM HOST TARGET GENE, is in fact common to other known non-viral miRNA genes. As mentioned hereinabove with reference to the background section, although a specific complementary binding site has been demonstrated only for some of the known miRNA genes (primarily Lin-4 and Let-7), all other recently discovered miRNA genes are also believed by those skilled in the art to modulate expression of other genes by complementary binding, although specific complementary binding sites of these other miRNA genes have not yet been found (Ruvkun G., Perspective: Glimpses of a tiny RNA world, Science 294, 779 (2001)).

[4248] It is yet further appreciated that a function of VGAM306 is inhibition of expression of host target genes, as part of a novel viral mechanism of attacking a host. Accordingly, utilities of VGAM306 include diagnosis, prevention and treatment of viral infection by Vaccinia virus. Specific functions, and accordingly utilities, of VGAM306 correlate with, and may be deduced from, the identity of the host target genes which VGAM306 binds and inhibits, and the function of these host target genes, as elaborated hereinbelow.

[4249] Nucleotide sequences of the VGAM306 precursor RNA, herein designated VGAM PRECURSOR RNA, and of the diced VGAM306 RNA, herein designated VGAM RNA, and a schematic representation of the secondary folding of VGAM306 folded precursor RNA, herein designated VGAM FOLDED PRECURSOR RNA, of VGAM306 are further described hereinbelow with reference to Table 1.

[4250] Nucleotide sequences of host target binding sites, such as BINDING SITE-I, BINDING SITE-II and BINDING SITE-III of FIG. 1, found on, and schematic representation of the complementarity of each of these host target binding sites to VGAM306 RNA, herein designated VGAM RNA, are described hereinbelow with reference to Table 2.

[4251] FIG. 1 further provides a conceptual description of another novel bioinformatically detected viral gene of the present invention, referred to here as Viral Genomic Address Messenger 307 (VGAM307) viral gene, which modulates expression of respective host target genes thereof, the function and utility of which host target genes is known in the art.

[4252] VGAM307 is a novel bioinformatically detected regulatory, non protein coding, viral micro RNA (miRNA) gene. The method by which VGAM307 was detected is described hereinabove with reference to FIGS. 2-8.

[4253] VGAM307 gene, herein designated VGAM GENE, is a viral gene contained in the genome of Vaccinia virus. VGAM307 host target gene, herein designated VGAM HOST TARGET GENE, is a human gene contained in the human genome.

[4254] VGAM307 gene, herein designated VGAM GENE, encodes a VGAM307 precursor RNA, herein designated VGAM PRECURSOR RNA. Similar to other miRNA genes, and unlike most ordinary genes, VGAM307 precursor RNA, herein designated VGAM PRECURSOR RNA, does not encode a protein. A nucleotide sequence identical or highly similar to the nucleotide sequence of VGAM307 precursor RNA is designated SEQ ID:293, and is provided hereinbelow with reference to the sequence listing part. Nucleotide sequence SEQ ID:293 is located at position 10139 relative to the genome of Vaccinia virus.

[4255] VGAM307 precursor RNA, herein designated VGAM PRECURSOR RNA, folds onto itself, forming VGAM307 folded precursor RNA, herein designated VGAM FOLDED PRECURSOR RNA, which has a two-dimensional hairpin structure. As is well known in the art, this hairpin structure, is typical of RNA encoded by miRNA genes, and is due to the fact that the nucleotide sequence of the first half of the RNA encoded by a miRNA gene is an accurate or partial inversed-reversed sequence of the nucleotide sequence of the second half thereof.

[4256] An enzyme complex designated DICER COMPLEX, dices the VGAM307 folded precursor RNA, herein designated VGAM FOLDED PRECURSOR RNA, into VGAM307 RNA, herein designated VGAM RNA, a single stranded ˜22 nt long RNA segment. As is known in the art, dicing of a hairpin structured RNA precursor product into a short ˜22 nt RNA segment is catalyzed by an enzyme complex comprising an enzyme called Dicer together with other necessary proteins. A probable (over 87%) nucleotide sequence of VGAM307 RNA is designated SEQ ID:642, and is provided hereinbelow with reference to the sequence listing part.

[4257] VGAM307 host target gene, herein designated VGAM HOST TARGET GENE, encodes a corresponding messenger RNA, VGAM307 host target RNA, herein designated VGAM HOST TARGET RNA. VGAM307 host target RNA, herein designated VGAM HOST TARGET RNA, comprises three regions, as is typical of mRNA of a protein coding gene: a 5 untranslated region, a protein coding region and a 3 untranslated region, designated 5UTR, PROTEIN CODING and 3UTR respectively.

[4258] VGAM307 RNA, herein designated VGAM RNA, binds complementarily to one or more host target binding sites located in untranslated regions of VGAM307 host target RNA, herein designated VGAM HOST TARGET RNA. This complementary binding is due to the fact that the nucleotide sequence of VGAM307 RNA, herein designated VGAM RNA, is an accurate or a partial inversed-reversed sequence of the nucleotide sequence of each of the host target binding sites. As an illustration, FIG. 1 shows 3 such host target binding sites, designated BINDING SITE I, BINDING SITE II and BINDING SITE III respectively. It is appreciated that the number of host target binding sites shown in FIG. 1 is meant as an illustration only, and is not meant to be limiting VGAM307 RNA, herein designated VGAM RNA, may have a different number of host target binding sites in untranslated regions of a VGAM307 host target RNA, herein designated VGAM HOST TARGET RNA. It is further appreciated that while FIG. 1 depicts host target binding sites in the 3UTR region, this is meant as an example only these host target binding sites may be located in the 3UTR region, the 5UTR region, or in both 3UTR and 5UTR regions.

[4259] The complementary binding of VGAM307 RNA, herein designated VGAM RNA, to host target binding sites on VGAM307 host target RNA, herein designated VGAM HOST TARGET RNA, such as BINDING SITE I, BINDING SITE II and BINDING SITE III, inhibits translation of VGAM307 host target RNA, herein designated VGAM HOST TARGET RNA, into VGAM307 host target protein, herein designated VGAM HOST TARGET PROTEIN. VGAM host target protein is therefore outlined by a broken line.

[4260] It is appreciated that VGAM307 host target gene, herein designated VGAM HOST TARGET GENE, in fact represents a plurality of VGAM307 host target genes. The mRNA of each one of this plurality of VGAM307 host target genes comprises one or more host target binding sites, each having a nucleotide sequence which is at least partly complementary to VGAM307 RNA, herein designated VGAM RNA, and which when bound by VGAM307 RNA, herein designated VGAM RNA, causes inhibition of translation of respective one or more VGAM307 host target proteins.

[4261] It is further appreciated by one skilled in the art that the mode of translational inhibition illustrated by FIG. 1 with specific reference to translational inhibition exerted by VGAM307 gene, herein designated VGAM GENE, on one or more VGAM307 host target gene, herein designated VGAM HOST TARGET GENE, is in fact common to other known non-viral miRNA genes. As mentioned hereinabove with reference to the background section, although a specific complementary binding site has been demonstrated only for some of the known miRNA genes (primarily Lin-4 and Let-7), all other recently discovered miRNA genes are also believed by those skilled in the art to modulate expression of other genes by complementary binding, although specific complementary binding sites of these other miRNA genes have not yet been found (Ruvkun G., Perspective: Glimpses of a tiny RNA world, Science 294, 779 (2001)).

[4262] It is yet further appreciated that a function of VGAM307 is inhibition of expression of host target genes, as part of a novel viral mechanism of attacking a host. Accordingly, utilities of VGAM307 include diagnosis, prevention and treatment of viral infection by Vaccinia virus. Specific functions, and accordingly utilities, of VGAM307 correlate with, and may be deduced from, the identity of the host target genes which VGAM307 binds and inhibits, and the function of these host target genes, as elaborated hereinbelow.

[4263] Nucleotide sequences of the VGAM307 precursor RNA, herein designated VGAM PRECURSOR RNA, and of the diced VGAM307 RNA, herein designated VGAM RNA, and a schematic representation of the secondary folding of VGAM307 folded precursor RNA, herein designated VGAM FOLDED PRECURSOR RNA, of VGAM307 are further described hereinbelow with reference to Table 1.

[4264] Nucleotide sequences of host target binding sites, such as BINDING SITE-I, BINDING SITE-II and BINDING SITE-III of FIG. 1, found on, and schematic representation of the complementarity of each of these host target binding sites to VGAM307 RNA, herein designated VGAM RNA, are described hereinbelow with reference to Table 2.

[4265] FIG. 1 further provides a conceptual description of another novel bioinformatically detected viral gene of the present invention, referred to here as Viral Genomic Address Messenger 308 (VGAM308) viral gene, which modulates expression of respective host target genes thereof, the function and utility of which host target genes is known in the art.

[4266] VGAM308 is a novel bioinformatically detected regulatory, non protein coding, viral micro RNA (miRNA) gene. The method by which VGAM308 was detected is described hereinabove with reference to FIGS. 2-8.

[4267] VGAM308 gene, herein designated VGAM GENE, is a viral gene contained in the genome of Vaccinia virus. VGAM308 host target gene, herein designated VGAM HOST TARGET GENE, is a human gene contained in the human genome.

[4268] VGAM308 gene, herein designated VGAM GENE, encodes a VGAM308 precursor RNA, herein designated VGAM PRECURSOR RNA. Similar to other miRNA genes, and unlike most ordinary genes, VGAM308 precursor RNA, herein designated VGAM PRECURSOR RNA, does not encode a protein. A nucleotide sequence identical or highly similar to the nucleotide sequence of VGAM308 precursor RNA is designated SEQ ID:294, and is provided hereinbelow with reference to the sequence listing part. Nucleotide sequence SEQ ID:294 is located at position 9119 relative to the genome of Vaccinia virus.

[4269] VGAM308 precursor RNA, herein designated VGAM PRECURSOR RNA, folds onto itself, forming VGAM308 folded precursor RNA, herein designated VGAM FOLDED PRECURSOR RNA, which has a two-dimensional hairpin structure. As is well known in the art, this hairpin structure, is typical of RNA encoded by miRNA genes, and is due to the fact that the nucleotide sequence of the first half of the RNA encoded by a miRNA gene is an accurate or partial inversed-reversed sequence of the nucleotide sequence of the second half thereof.

[4270] An enzyme complex designated DICER COMPLEX, dices the VGAM308 folded precursor RNA, herein designated VGAM FOLDED PRECURSOR RNA, into VGAM308 RNA, herein designated VGAM RNA, a single stranded ˜22 nt long RNA segment. As is known in the art, dicing of a hairpin structured RNA precursor product into a short ˜22 nt RNA segment is catalyzed by an enzyme complex comprising an enzyme called Dicer together with other necessary proteins. A probable (over 83%) nucleotide sequence of VGAM308 RNA is designated SEQ ID:643, and is provided hereinbelow with reference to the sequence listing part.

[4271] VGAM308 host target gene, herein designated VGAM HOST TARGET GENE, encodes a corresponding messenger RNA, VGAM308 host target RNA, herein designated VGAM HOST TARGET RNA. VGAM308 host target RNA, herein designated VGAM HOST TARGET RNA, comprises three regions, as is typical of mRNA of a protein coding gene: a 5 untranslated region, a protein coding region and a 3 untranslated region, designated 5UTR, PROTEIN CODING and 3UTR respectively.

[4272] VGAM308 RNA, herein designated VGAM RNA, binds complementarily to one or more host target binding sites located in untranslated regions of VGAM308 host target RNA, herein designated VGAM HOST TARGET RNA. This complementary binding is due to the fact that the nucleotide sequence of VGAM308 RNA, herein designated VGAM RNA, is an accurate or a partial inversed-reversed sequence of the nucleotide sequence of each of the host target binding sites. As an illustration, FIG. 1 shows 3 such host target binding sites, designated BINDING SITE I, BINDING SITE II and BINDING SITE III respectively. It is appreciated that the number of host target binding sites shown in FIG. 1 is meant as an illustration only, and is not meant to be limiting VGAM308 RNA, herein designated VGAM RNA, may have a different number of host target binding sites in untranslated regions of a VGAM308 host target RNA, herein designated VGAM HOST TARGET RNA. It is further appreciated that while FIG. 1 depicts host target binding sites in the 3UTR region, this is meant as an example only these host target binding sites may be located in the 3UTR region, the 5UTR region, or in both 3UTR and 5UTR regions.

[4273] The complementary binding of VGAM308 RNA, herein designated VGAM RNA, to host target binding sites on VGAM308 host target RNA, herein designated VGAM HOST TARGET RNA, such as BINDING SITE I, BINDING SITE II and BINDING SITE III, inhibits translation of VGAM308 host target RNA, herein designated VGAM HOST TARGET RNA, into VGAM308 host target protein, herein designated VGAM HOST TARGET PROTEIN. VGAM host target protein is therefore outlined by a broken line.

[4274] It is appreciated that VGAM308 host target gene, herein designated VGAM HOST TARGET GENE, in fact represents a plurality of VGAM308 host target genes. The mRNA of each one of this plurality of VGAM308 host target genes comprises one or more host target binding sites, each having a nucleotide sequence which is at least partly complementary to VGAM308 RNA, herein designated VGAM RNA, and which when bound by VGAM308 RNA, herein designated VGAM RNA, causes inhibition of translation of respective one or more VGAM308 host target proteins.

[4275] It is further appreciated by one skilled in the art that the mode of translational inhibition illustrated by FIG. 1 with specific reference to translational inhibition exerted by VGAM308 gene, herein designated VGAM GENE, on one or more VGAM308 host target gene, herein designated VGAM HOST TARGET GENE, is in fact common to other known non-viral miRNA genes. As mentioned hereinabove with reference to the background section, although a specific complementary binding site has been demonstrated only for some of the known miRNA genes (primarily Lin-4 and Let-7), all other recently discovered miRNA genes are also believed by those skilled in the art to modulate expression of other genes by complementary binding, although specific complementary binding sites of these other miRNA genes have not yet been found (Ruvkun G., Perspective: Glimpses of a tiny RNA world, Science 294, 779 (2001)).

[4276] It is yet further appreciated that a function of VGAM308 is inhibition of expression of host target genes, as part of a novel viral mechanism of attacking a host. Accordingly, utilities of VGAM308 include diagnosis, prevention and treatment of viral infection by Vaccinia virus. Specific functions, and accordingly utilities, of VGAM308 correlate with, and may be deduced from, the identity of the host target genes which VGAM308 binds and inhibits, and the function of these host target genes, as elaborated hereinbelow.

[4277] Nucleotide sequences of the VGAM308 precursor RNA, herein designated VGAM PRECURSOR RNA, and of the diced VGAM308 RNA, herein designated VGAM RNA, and a schematic representation of the secondary folding of VGAM308 folded precursor RNA, herein designated VGAM FOLDED PRECURSOR RNA, of VGAM308 are further described hereinbelow with reference to Table 1.

[4278] Nucleotide sequences of host target binding sites, such as BINDING SITE-I, BINDING SITE-II and BINDING SITE-III of FIG. 1, found on, and schematic representation of the complementarity of each of these host target binding sites to VGAM308 RNA, herein designated VGAM RNA, are described hereinbelow with reference to Table 2.

[4279] FIG. 1 further provides a conceptual description of another novel bioinformatically detected viral gene of the present invention, referred to here as Viral Genomic Address Messenger 309 (VGAM309) viral gene, which modulates expression of respective host target genes thereof, the function and utility of which host target genes is known in the art.

[4280] VGAM309 is a novel bioinformatically detected regulatory, non protein coding, viral micro RNA (miRNA) gene. The method by which VGAM309 was detected is described hereinabove with reference to FIGS. 2-8.

[4281] VGAM309 gene, herein designated VGAM GENE, is a viral gene contained in the genome of Vaccinia virus. VGAM309 host target gene, herein designated VGAM HOST TARGET GENE, is a human gene contained in the human genome.

[4282] VGAM309 gene, herein designated VGAM GENE, encodes a VGAM309 precursor RNA, herein designated VGAM PRECURSOR RNA. Similar to other miRNA genes, and unlike most ordinary genes, VGAM309 precursor RNA, herein designated VGAM PRECURSOR RNA, does not encode a protein. A nucleotide sequence identical or highly similar to the nucleotide sequence of VGAM309 precursor RNA is designated SEQ ID:295, and is provided hereinbelow with reference to the sequence listing part. Nucleotide sequence SEQ ID:295 is located at position 177929 relative to the genome of Vaccinia virus.

[4283] VGAM309 precursor RNA, herein designated VGAM PRECURSOR RNA, folds onto itself, forming VGAM309 folded precursor RNA, herein designated VGAM FOLDED PRECURSOR RNA, which has a two-dimensional hairpin structure. As is well known in the art, this hairpin structure, is typical of RNA encoded by miRNA genes, and is due to the fact that the nucleotide sequence of the first half of the RNA encoded by a miRNA gene is an accurate or partial inversed-reversed sequence of the nucleotide sequence of the second half thereof.

[4284] An enzyme complex designated DICER COMPLEX, dices the VGAM309 folded precursor RNA, herein designated VGAM FOLDED PRECURSOR RNA, into VGAM309 RNA, herein designated VGAM RNA, a single stranded ˜22 nt long RNA segment. As is known in the art, dicing of a hairpin structured RNA precursor product into a short ˜22 nt RNA segment is catalyzed by an enzyme complex comprising an enzyme called Dicer together with other necessary proteins. A probable (over 72%) nucleotide sequence of VGAM309 RNA is designated SEQ ID:644, and is provided hereinbelow with reference to the sequence listing part.

[4285] VGAM309 host target gene, herein designated VGAM HOST TARGET GENE, encodes a corresponding messenger RNA, VGAM309 host target RNA, herein designated VGAM HOST TARGET RNA. VGAM309 host target RNA, herein designated VGAM HOST TARGET RNA, comprises three regions, as is typical of mRNA of a protein coding gene: a 5 untranslated region, a protein coding region and a 3 untranslated region, designated 5UTR, PROTEIN CODING and 3UTR respectively.

[4286] VGAM309 RNA, herein designated VGAM RNA, binds complementarily to one or more host target binding sites located in untranslated regions of VGAM309 host target RNA, herein designated VGAM HOST TARGET RNA. This complementary binding is due to the fact that the nucleotide sequence of VGAM309 RNA, herein designated VGAM RNA, is an accurate or a partial inversed-reversed sequence of the nucleotide sequence of each of the host target binding sites. As an illustration, FIG. 1 shows 3 such host target binding sites, designated BINDING SITE I, BINDING SITE II and BINDING SITE III respectively. It is appreciated that the number of host target binding sites shown in FIG. 1 is meant as an illustration only, and is not meant to be limiting VGAM309 RNA, herein designated VGAM RNA, may have a different number of host target binding sites in untranslated regions of a VGAM309 host target RNA, herein designated VGAM HOST TARGET RNA. It is further appreciated that while FIG. 1 depicts host target binding sites in the 3UTR region, this is meant as an example only these host target binding sites may be located in the 3UTR region, the 5UTR region, or in both 3UTR and 5UTR regions.

[4287] The complementary binding of VGAM309 RNA, herein designated VGAM RNA, to host target binding sites on VGAM309 host target RNA, herein designated VGAM HOST TARGET RNA, such as BINDING SITE I, BINDING SITE II and BINDING SITE III, inhibits translation of VGAM309 host target RNA, herein designated VGAM HOST TARGET RNA, into VGAM309 host target protein, herein designated VGAM HOST TARGET PROTEIN. VGAM host target protein is therefore outlined by a broken line.

[4288] It is appreciated that VGAM309 host target gene, herein designated VGAM HOST TARGET GENE, in fact represents a plurality of VGAM309 host target genes. The mRNA of each one of this plurality of VGAM309 host target genes comprises one or more host target binding sites, each having a nucleotide sequence which is at least partly complementary to VGAM309 RNA, herein designated VGAM RNA, and which when bound by VGAM309 RNA, herein designated VGAM RNA, causes inhibition of translation of respective one or more VGAM309 host target proteins.

[4289] It is further appreciated by one skilled in the art that the mode of translational inhibition illustrated by FIG. 1 with specific reference to translational inhibition exerted by VGAM309 gene, herein designated VGAM GENE, on one or more VGAM309 host target gene, herein designated VGAM HOST TARGET GENE, is in fact common to other known non-viral miRNA genes. As mentioned hereinabove with reference to the background section, although a specific complementary binding site has been demonstrated only for some of the known miRNA genes (primarily Lin-4 and Let-7), all other recently discovered miRNA genes are also believed by those skilled in the art to modulate expression of other genes by complementary binding, although specific complementary binding sites of these other miRNA genes have not yet been found (Ruvkun G., Perspective: Glimpses of a tiny RNA world, Science 294, 779 (2001)).

[4290] It is yet further appreciated that a function of VGAM309 is inhibition of expression of host target genes, as part of a novel viral mechanism of attacking a host. Accordingly, utilities of VGAM309 include diagnosis, prevention and treatment of viral infection by Vaccinia virus. Specific functions, and accordingly utilities, of VGAM309 correlate with, and may be deduced from, the identity of the host target genes which VGAM309 binds and inhibits, and the function of these host target genes, as elaborated hereinbelow.

[4291] Nucleotide sequences of the VGAM309 precursor RNA, herein designated VGAM PRECURSOR RNA, and of the diced VGAM309 RNA, herein designated VGAM RNA, and a schematic representation of the secondary folding of VGAM309 folded precursor RNA, herein designated VGAM FOLDED PRECURSOR RNA, of VGAM309 are further described hereinbelow with reference to Table 1.

[4292] Nucleotide sequences of host target binding sites, such as BINDING SITE-I, BINDING SITE-II and BINDING SITE-III of FIG. 1, found on, and schematic representation of the complementarity of each of these host target binding sites to VGAM309 RNA, herein designated VGAM RNA, are described hereinbelow with reference to Table 2.

[4293] FIG. 1 further provides a conceptual description of another novel bioinformatically detected viral gene of the present invention, referred to here as Viral Genomic Address Messenger 310 (VGAM310) viral gene, which modulates expression of respective host target genes thereof, the function and utility of which host target genes is known in the art.

[4294] VGAM310 is a novel bioinformatically detected regulatory, non protein coding, viral micro RNA (miRNA) gene. The method by which VGAM310 was detected is described hereinabove with reference to FIGS. 2-8.

[4295] VGAM310 gene, herein designated VGAM GENE, is a viral gene contained in the genome of Vaccinia virus. VGAM310 host target gene, herein designated VGAM HOST TARGET GENE, is a human gene contained in the human genome.

[4296] VGAM310 gene, herein designated VGAM GENE, encodes a VGAM310 precursor RNA, herein designated VGAM PRECURSOR RNA. Similar to other miRNA genes, and unlike most ordinary genes, VGAM310 precursor RNA, herein designated VGAM PRECURSOR RNA, does not encode a protein. A nucleotide sequence identical or highly similar to the nucleotide sequence of VGAM310 precursor RNA is designated SEQ ID:296, and is provided hereinbelow with reference to the sequence listing part. Nucleotide sequence SEQ ID:296 is located at position 9389 relative to the genome of Vaccinia virus.

[4297] VGAM310 precursor RNA, herein designated VGAM PRECURSOR RNA, folds onto itself, forming VGAM310 folded precursor RNA, herein designated VGAM FOLDED PRECURSOR RNA, which has a two-dimensional hairpin structure. As is well known in the art, this hairpin structure, is typical of RNA encoded by miRNA genes, and is due to the fact that the nucleotide sequence of the first half of the RNA encoded by a miRNA gene is an accurate or partial inversed-reversed sequence of the nucleotide sequence of the second half thereof.

[4298] An enzyme complex designated DICER COMPLEX, dices the VGAM310 folded precursor RNA, herein designated VGAM FOLDED PRECURSOR RNA, into VGAM310 RNA, herein designated VGAM RNA, a single stranded ˜22 nt long RNA segment. As is known in the art, dicing of a hairpin structured RNA precursor product into a short ˜22 nt RNA segment is catalyzed by an enzyme complex comprising an enzyme called Dicer together with other necessary proteins. A probable (over 70%) nucleotide sequence of VGAM310 RNA is designated SEQ ID:645, and is provided hereinbelow with reference to the sequence listing part.

[4299] VGAM310 host target gene, herein designated VGAM HOST TARGET GENE, encodes a corresponding messenger RNA, VGAM310 host target RNA, herein designated VGAM HOST TARGET RNA. VGAM310 host target RNA, herein designated VGAM HOST TARGET RNA, comprises three regions, as is typical of mRNA of a protein coding gene: a 5 untranslated region, a protein coding region and a 3 untranslated region, designated 5UTR, PROTEIN CODING and 3UTR respectively.

[4300] VGAM310 RNA, herein designated VGAM RNA, binds complementarily to one or more host target binding sites located in untranslated regions of VGAM310 host target RNA, herein designated VGAM HOST TARGET RNA. This complementary binding is due to the fact that the nucleotide sequence of VGAM310 RNA, herein designated VGAM RNA, is an accurate or a partial inversed-reversed sequence of the nucleotide sequence of each of the host target binding sites. As an illustration, FIG. 1 shows 3 such host target binding sites, designated BINDING SITE I, BINDING SITE II and BINDING SITE III respectively. It is appreciated that the number of host target binding sites shown in FIG. 1 is meant as an illustration only, and is not meant to be limiting VGAM310 RNA, herein designated VGAM RNA, may have a different number of host target binding sites in untranslated regions of a VGAM310 host target RNA, herein designated VGAM HOST TARGET RNA. It is further appreciated that while FIG. 1 depicts host target binding sites in the 3UTR region, this is meant as an example only these host target binding sites may be located in the 3UTR region, the 5UTR region, or in both 3UTR and 5UTR regions.

[4301] The complementary binding of VGAM310 RNA, herein designated VGAM RNA, to host target binding sites on VGAM310 host target RNA, herein designated VGAM HOST TARGET RNA, such as BINDING SITE I, BINDING SITE II and BINDING SITE III, inhibits translation of VGAM310 host target RNA, herein designated VGAM HOST TARGET RNA, into VGAM310 host target protein, herein designated VGAM HOST TARGET PROTEIN. VGAM host target protein is therefore outlined by a broken line.

[4302] It is appreciated that VGAM310 host target gene, herein designated VGAM HOST TARGET GENE, in fact represents a plurality of VGAM310 host target genes. The mRNA of each one of this plurality of VGAM310 host target genes comprises one or more host target binding sites, each having a nucleotide sequence which is at least partly complementary to VGAM310 RNA, herein designated VGAM RNA, and which when bound by VGAM310 RNA, herein designated VGAM RNA, causes inhibition of translation of respective one or more VGAM310 host target proteins.

[4303] It is further appreciated by one skilled in the art that the mode of translational inhibition illustrated by FIG. 1 with specific reference to translational inhibition exerted by VGAM310 gene, herein designated VGAM GENE, on one or more VGAM310 host target gene, herein designated VGAM HOST TARGET GENE, is in fact common to other known non-viral miRNA genes. As mentioned hereinabove with reference to the background section, although a specific complementary binding site has been demonstrated only for some of the known miRNA genes (primarily Lin-4 and Let-7), all other recently discovered miRNA genes are also believed by those skilled in the art to modulate expression of other genes by complementary binding, although specific complementary binding sites of these other miRNA genes have not yet been found (Ruvkun G., Perspective: Glimpses of a tiny RNA world, Science 294, 779 (2001)).

[4304] It is yet further appreciated that a function of VGAM310 is inhibition of expression of host target genes, as part of a novel viral mechanism of attacking a host. Accordingly, utilities of VGAM310 include diagnosis, prevention and treatment of viral infection by Vaccinia virus. Specific functions, and accordingly utilities, of VGAM310 correlate with, and may be deduced from, the identity of the host target genes which VGAM310 binds and inhibits, and the function of these host target genes, as elaborated hereinbelow.

[4305] Nucleotide sequences of the VGAM310 precursor RNA, herein designated VGAM PRECURSOR RNA, and of the diced VGAM310 RNA, herein designated VGAM RNA, and a schematic representation of the secondary folding of VGAM310 folded precursor RNA, herein designated VGAM FOLDED PRECURSOR RNA, of VGAM310 are further described hereinbelow with reference to Table 1.

[4306] Nucleotide sequences of host target binding sites, such as BINDING SITE-I, BINDING SITE-II and BINDING SITE-III of FIG. 1, found on, and schematic representation of the complementarity of each of these host target binding sites to VGAM310 RNA, herein designated VGAM RNA, are described hereinbelow with reference to Table 2.

[4307] FIG. 1 further provides a conceptual description of another novel bioinformatically detected viral gene of the present invention, referred to here as Viral Genomic Address Messenger 311 (VGAM311) viral gene, which modulates expression of respective host target genes thereof, the function and utility of which host target genes is known in the art.

[4308] VGAM311 is a novel bioinformatically detected regulatory, non protein coding, viral micro RNA (miRNA) gene. The method by which VGAM311 was detected is described hereinabove with reference to FIGS. 2-8.

[4309] VGAM311 gene, herein designated VGAM GENE, is a viral gene contained in the genome of Vaccinia virus. VGAM311 host target gene, herein designated VGAM HOST TARGET GENE, is a human gene contained in the human genome.

[4310] VGAM311 gene, herein designated VGAM GENE, encodes a VGAM311 precursor RNA, herein designated VGAM PRECURSOR RNA. Similar to other miRNA genes, and unlike most ordinary genes, VGAM311 precursor RNA, herein designated VGAM PRECURSOR RNA, does not encode a protein. A nucleotide sequence identical or highly similar to the nucleotide sequence of VGAM311 precursor RNA is designated SEQ ID:297, and is provided hereinbelow with reference to the sequence listing part. Nucleotide sequence SEQ ID:297 is located at position 176858 relative to the genome of Vaccinia virus.

[4311] VGAM311 precursor RNA, herein designated VGAM PRECURSOR RNA, folds onto itself, forming VGAM311 folded precursor RNA, herein designated VGAM FOLDED PRECURSOR RNA, which has a two-dimensional hairpin structure. As is well known in the art, this hairpin structure, is typical of RNA encoded by miRNA genes, and is due to the fact that the nucleotide sequence of the first half of the RNA encoded by a miRNA gene is an accurate or partial inversed-reversed sequence of the nucleotide sequence of the second half thereof.

[4312] An enzyme complex designated DICER COMPLEX, dices the VGAM311 folded precursor RNA, herein designated VGAM FOLDED PRECURSOR RNA, into VGAM311 RNA, herein designated VGAM RNA, a single stranded ˜22 nt long RNA segment. As is known in the art, dicing of a hairpin structured RNA precursor product into a short ˜22 nt RNA segment is catalyzed by an enzyme complex comprising an enzyme called Dicer together with other necessary proteins. A probable (over 76%) nucleotide sequence of VGAM311 RNA is designated SEQ ID:646, and is provided hereinbelow with reference to the sequence listing part.

[4313] VGAM311 host target gene, herein designated VGAM HOST TARGET GENE, encodes a corresponding messenger RNA, VGAM311 host target RNA, herein designated VGAM HOST TARGET RNA. VGAM311 host target RNA, herein designated VGAM HOST TARGET RNA, comprises three regions, as is typical of mRNA of a protein coding gene: a 5 untranslated region, a protein coding region and a 3 untranslated region, designated 5UTR, PROTEIN CODING and 3UTR respectively.

[4314] VGAM311 RNA, herein designated VGAM RNA, binds complementarily to one or more host target binding sites located in untranslated regions of VGAM311 host target RNA, herein designated VGAM HOST TARGET RNA. This complementary binding is due to the fact that the nucleotide sequence of VGAM311 RNA, herein designated VGAM RNA, is an accurate or a partial inversed-reversed sequence of the nucleotide sequence of each of the host target binding sites. As an illustration, FIG. 1 shows 3 such host target binding sites, designated BINDING SITE I, BINDING SITE II and BINDING SITE III respectively. It is appreciated that the number of host target binding sites shown in FIG. 1 is meant as an illustration only, and is not meant to be limiting VGAM311 RNA, herein designated VGAM RNA, may have a different number of host target binding sites in untranslated regions of a VGAM311 host target RNA, herein designated VGAM HOST TARGET RNA. It is further appreciated that while FIG. 1 depicts host target binding sites in the 3UTR region, this is meant as an example only these host target binding sites may be located in the 3UTR region, the 5UTR region, or in both 3UTR and 5UTR regions.

[4315] The complementary binding of VGAM311 RNA, herein designated VGAM RNA, to host target binding sites on VGAM311 host target RNA, herein designated VGAM HOST TARGET RNA, such as BINDING SITE I, BINDING SITE II and BINDING SITE III, inhibits translation of VGAM311 host target RNA, herein designated VGAM HOST TARGET RNA, into VGAM311 host target protein, herein designated VGAM HOST TARGET PROTEIN. VGAM host target protein is therefore outlined by a broken line.

[4316] It is appreciated that VGAM311 host target gene, herein designated VGAM HOST TARGET GENE, in fact represents a plurality of VGAM311 host target genes. The mRNA of each one of this plurality of VGAM311 host target genes comprises one or more host target binding sites, each having a nucleotide sequence which is at least partly complementary to VGAM311 RNA, herein designated VGAM RNA, and which when bound by VGAM311 RNA, herein designated VGAM RNA, causes inhibition of translation of respective one or more VGAM311 host target proteins.

[4317] It is further appreciated by one skilled in the art that the mode of translational inhibition illustrated by FIG. 1 with specific reference to translational inhibition exerted by VGAM311 gene, herein designated VGAM GENE, on one or more VGAM311 host target gene, herein designated VGAM HOST TARGET GENE, is in fact common to other known non-viral miRNA genes. As mentioned hereinabove with reference to the background section, although a specific complementary binding site has been demonstrated only for some of the known miRNA genes (primarily Lin-4 and Let-7), all other recently discovered miRNA genes are also believed by those skilled in the art to modulate expression of other genes by complementary binding, although specific complementary binding sites of these other miRNA genes have not yet been found (Ruvkun G., Perspective: Glimpses of a tiny RNA world, Science 294, 779 (2001)).

[4318] It is yet further appreciated that a function of VGAM311 is inhibition of expression of host target genes, as part of a novel viral mechanism of attacking a host. Accordingly, utilities of VGAM311 include diagnosis, prevention and treatment of viral infection by Vaccinia virus. Specific functions, and accordingly utilities, of VGAM311 correlate with, and may be deduced from, the identity of the host target genes which VGAM311 binds and inhibits, and the function of these host target genes, as elaborated hereinbelow.

[4319] Nucleotide sequences of the VGAM311 precursor RNA, herein designated VGAM PRECURSOR RNA, and of the diced VGAM311 RNA, herein designated VGAM RNA, and a schematic representation of the secondary folding of VGAM311 folded precursor RNA, herein designated VGAM FOLDED PRECURSOR RNA, of VGAM311 are further described hereinbelow with reference to Table 1.

[4320] Nucleotide sequences of host target binding sites, such as BINDING SITE-I, BINDING SITE-II and BINDING SITE-III of FIG. 1, found on, and schematic representation of the complementarity of each of these host target binding sites to VGAM311 RNA, herein designated VGAM RNA, are described hereinbelow with reference to Table 2.

[4321] FIG. 1 further provides a conceptual description of another novel bioinformatically detected viral gene of the present invention, referred to here as Viral Genomic Address Messenger 312 (VGAM312) viral gene, which modulates expression of respective host target genes thereof, the function and utility of which host target genes is known in the art.

[4322] VGAM312 is a novel bioinformatically detected regulatory, non protein coding, viral micro RNA (miRNA) gene. The method by which VGAM312 was detected is described hereinabove with reference to FIGS. 2-8.

[4323] VGAM312 gene, herein designated VGAM GENE, is a viral gene contained in the genome of Vaccinia virus. VGAM312 host target gene, herein designated VGAM HOST TARGET GENE, is a human gene contained in the human genome.

[4324] VGAM312 gene, herein designated VGAM GENE, encodes a VGAM312 precursor RNA, herein designated VGAM PRECURSOR RNA. Similar to other miRNA genes, and unlike most ordinary genes, VGAM312 precursor RNA, herein designated VGAM PRECURSOR RNA, does not encode a protein. A nucleotide sequence identical or highly similar to the nucleotide sequence of VGAM312 precursor RNA is designated SEQ ID:298, and is provided hereinbelow with reference to the sequence listing part. Nucleotide sequence SEQ ID:298 is located at position 177797 relative to the genome of Vaccinia virus.

[4325] VGAM312 precursor RNA, herein designated VGAM PRECURSOR RNA, folds onto itself, forming VGAM312 folded precursor RNA, herein designated VGAM FOLDED PRECURSOR RNA, which has a two-dimensional hairpin structure. As is well known in the art, this hairpin structure, is typical of RNA encoded by miRNA genes, and is due to the fact that the nucleotide sequence of the first half of the RNA encoded by a miRNA gene is an accurate or partial inversed-reversed sequence of the nucleotide sequence of the second half thereof.

[4326] An enzyme complex designated DICER COMPLEX, dices the VGAM312 folded precursor RNA, herein designated VGAM FOLDED PRECURSOR RNA, into VGAM312 RNA, herein designated VGAM RNA, a single stranded ˜22 nt long RNA segment. As is known in the art, dicing of a hairpin structured RNA precursor product into a short ˜22 nt RNA segment is catalyzed by an enzyme complex comprising an enzyme called Dicer together with other necessary proteins. A probable (over 74%) nucleotide sequence of VGAM312 RNA is designated SEQ ID:647, and is provided hereinbelow with reference to the sequence listing part.

[4327] VGAM312 host target gene, herein designated VGAM HOST TARGET GENE, encodes a corresponding messenger RNA, VGAM312 host target RNA, herein designated VGAM HOST TARGET RNA. VGAM312 host target RNA, herein designated VGAM HOST TARGET RNA, comprises three regions, as is typical of mRNA of a protein coding gene: a 5 untranslated region, a protein coding region and a 3 untranslated region, designated 5UTR, PROTEIN CODING and 3UTR respectively.

[4328] VGAM312 RNA, herein designated VGAM RNA, binds complementarily to one or more host target binding sites located in untranslated regions of VGAM312 host target RNA, herein designated VGAM HOST TARGET RNA. This complementary binding is due to the fact that the nucleotide sequence of VGAM312 RNA, herein designated VGAM RNA, is an accurate or a partial inversed-reversed sequence of the nucleotide sequence of each of the host target binding sites. As an illustration, FIG. 1 shows 3 such host target binding sites, designated BINDING SITE I, BINDING SITE II and BINDING SITE III respectively. It is appreciated that the number of host target binding sites shown in FIG. 1 is meant as an illustration only, and is not meant to be limiting VGAM312 RNA, herein designated VGAM RNA, may have a different number of host target binding sites in untranslated regions of a VGAM312 host target RNA, herein designated VGAM HOST TARGET RNA. It is further appreciated that while FIG. 1 depicts host target binding sites in the 3UTR region, this is meant as an example only these host target binding sites may be located in the 3UTR region, the 5UTR region, or in both 3UTR and 5UTR regions.

[4329] The complementary binding of VGAM312 RNA, herein designated VGAM RNA, to host target binding sites on VGAM312 host target RNA, herein designated VGAM HOST TARGET RNA, such as BINDING SITE I, BINDING SITE II and BINDING SITE III, inhibits translation of VGAM312 host target RNA, herein designated VGAM HOST TARGET RNA, into VGAM312 host target protein, herein designated VGAM HOST TARGET PROTEIN. VGAM host target protein is therefore outlined by a broken line.

[4330] It is appreciated that VGAM312 host target gene, herein designated VGAM HOST TARGET GENE, in fact represents a plurality of VGAM312 host target genes. The mRNA of each one of this plurality of VGAM312 host target genes comprises one or more host target binding sites, each having a nucleotide sequence which is at least partly complementary to VGAM312 RNA, herein designated VGAM RNA, and which when bound by VGAM312 RNA, herein designated VGAM RNA, causes inhibition of translation of respective one or more VGAM312 host target proteins.

[4331] It is further appreciated by one skilled in the art that the mode of translational inhibition illustrated by FIG. 1 with specific reference to translational inhibition exerted by VGAM312 gene, herein designated VGAM GENE, on one or more VGAM312 host target gene, herein designated VGAM HOST TARGET GENE, is in fact common to other known non-viral miRNA genes. As mentioned hereinabove with reference to the background section, although a specific complementary binding site has been demonstrated only for some of the known miRNA genes (primarily Lin-4 and Let-7), all other recently discovered miRNA genes are also believed by those skilled in the art to modulate expression of other genes by complementary binding, although specific complementary binding sites of these other miRNA genes have not yet been found (Ruvkun G., Perspective: Glimpses of a tiny RNA world, Science 294, 779 (2001)).

[4332] It is yet further appreciated that a function of VGAM312 is inhibition of expression of host target genes, as part of a novel viral mechanism of attacking a host. Accordingly, utilities of VGAM312 include diagnosis, prevention and treatment of viral infection by Vaccinia virus. Specific functions, and accordingly utilities, of VGAM312 correlate with, and may be deduced from, the identity of the host target genes which VGAM312 binds and inhibits, and the function of these host target genes, as elaborated hereinbelow.

[4333] Nucleotide sequences of the VGAM312 precursor RNA, herein designated VGAM PRECURSOR RNA, and of the diced VGAM312 RNA, herein designated VGAM RNA, and a schematic representation of the secondary folding of VGAM312 folded precursor RNA, herein designated VGAM FOLDED PRECURSOR RNA, of VGAM312 are further described hereinbelow with reference to Table 1.

[4334] Nucleotide sequences of host target binding sites, such as BINDING SITE-I, BINDING SITE-II and BINDING SITE-III of FIG. 1, found on, and schematic representation of the complementarity of each of these host target binding sites to VGAM312 RNA, herein designated VGAM RNA, are described hereinbelow with reference to Table 2.

[4335] FIG. 1 further provides a conceptual description of another novel bioinformatically detected viral gene of the present invention, referred to here as Viral Genomic Address Messenger 313 (VGAM313) viral gene, which modulates expression of respective host target genes thereof, the function and utility of which host target genes is known in the art.

[4336] VGAM313 is a novel bioinformatically detected regulatory, non protein coding, viral micro RNA (miRNA) gene. The method by which VGAM313 was detected is described hereinabove with reference to FIGS. 2-8.

[4337] VGAM313 gene, herein designated VGAM GENE, is a viral gene contained in the genome of Vaccinia virus. VGAM313 host target gene, herein designated VGAM HOST TARGET GENE, is a human gene contained in the human genome.

[4338] VGAM313 gene, herein designated VGAM GENE, encodes a VGAM313 precursor RNA, herein designated VGAM PRECURSOR RNA. Similar to other miRNA genes, and unlike most ordinary genes, VGAM313 precursor RNA, herein designated VGAM PRECURSOR RNA, does not encode a protein. A nucleotide sequence identical or highly similar to the nucleotide sequence of VGAM313 precursor RNA is designated SEQ ID:299, and is provided hereinbelow with reference to the sequence listing part. Nucleotide sequence SEQ ID:299 is located at position 10272 relative to the genome of Vaccinia virus.

[4339] VGAM313 precursor RNA, herein designated VGAM PRECURSOR RNA, folds onto itself, forming VGAM313 folded precursor RNA, herein designated VGAM FOLDED PRECURSOR RNA, which has a two-dimensional hairpin structure. As is well known in the art, this hairpin structure, is typical of RNA encoded by miRNA genes, and is due to the fact that the nucleotide sequence of the first half of the RNA encoded by a miRNA gene is an accurate or partial inversed-reversed sequence of the nucleotide sequence of the second half thereof.

[4340] An enzyme complex designated DICER COMPLEX, dices the VGAM313 folded precursor RNA, herein designated VGAM FOLDED PRECURSOR RNA, into VGAM313 RNA, herein designated VGAM RNA, a single stranded ˜22 nt long RNA segment. As is known in the art, dicing of a hairpin structured RNA precursor product into a short ˜22 nt RNA segment is catalyzed by an enzyme complex comprising an enzyme called Dicer together with other necessary proteins. A probable (over 83%) nucleotide sequence of VGAM313 RNA is designated SEQ ID:648, and is provided hereinbelow with reference to the sequence listing part.

[4341] VGAM313 host target gene, herein designated VGAM HOST TARGET GENE, encodes a corresponding messenger RNA, VGAM313 host target RNA, herein designated VGAM HOST TARGET RNA. VGAM313 host target RNA, herein designated VGAM HOST TARGET RNA, comprises three regions, as is typical of mRNA of a protein coding gene: a 5 untranslated region, a protein coding region and a 3 untranslated region, designated 5UTR, PROTEIN CODING and 3UTR respectively.

[4342] VGAM313 RNA, herein designated VGAM RNA, binds complementarily to one or more host target binding sites located in untranslated regions of VGAM313 host target RNA, herein designated VGAM HOST TARGET RNA. This complementary binding is due to the fact that the nucleotide sequence of VGAM313 RNA, herein designated VGAM RNA, is an accurate or a partial inversed-reversed sequence of the nucleotide sequence of each of the host target binding sites. As an illustration, FIG. 1 shows 3 such host target binding sites, designated BINDING SITE I, BINDING SITE II and BINDING SITE III respectively. It is appreciated that the number of host target binding sites shown in FIG. 1 is meant as an illustration only, and is not meant to be limiting VGAM313 RNA, herein designated VGAM RNA, may have a different number of host target binding sites in untranslated regions of a VGAM313 host target RNA, herein designated VGAM HOST TARGET RNA. It is further appreciated that while FIG. 1 depicts host target binding sites in the 3UTR region, this is meant as an example only these host target binding sites may be located in the 3UTR region, the 5UTR region, or in both 3UTR and 5UTR regions.

[4343] The complementary binding of VGAM313 RNA, herein designated VGAM RNA, to host target binding sites on VGAM313 host target RNA, herein designated VGAM HOST TARGET RNA, such as BINDING SITE I, BINDING SITE II and BINDING SITE III, inhibits translation of VGAM313 host target RNA, herein designated VGAM HOST TARGET RNA, into VGAM313 host target protein, herein designated VGAM HOST TARGET PROTEIN. VGAM host target protein is therefore outlined by a broken line.

[4344] It is appreciated that VGAM313 host target gene, herein designated VGAM HOST TARGET GENE, in fact represents a plurality of VGAM313 host target genes. The mRNA of each one of this plurality of VGAM313 host target genes comprises one or more host target binding sites, each having a nucleotide sequence which is at least partly complementary to VGAM313 RNA, herein designated VGAM RNA, and which when bound by VGAM313 RNA, herein designated VGAM RNA, causes inhibition of translation of respective one or more VGAM313 host target proteins.

[4345] It is further appreciated by one skilled in the art that the mode of translational inhibition illustrated by FIG. 1 with specific reference to translational inhibition exerted by VGAM313 gene, herein designated VGAM GENE, on one or more VGAM313 host target gene, herein designated VGAM HOST TARGET GENE, is in fact common to other known non-viral miRNA genes. As mentioned hereinabove with reference to the background section, although a specific complementary binding site has been demonstrated only for some of the known miRNA genes (primarily Lin-4 and Let-7), all other recently discovered miRNA genes are also believed by those skilled in the art to modulate expression of other genes by complementary binding, although specific complementary binding sites of these other miRNA genes have not yet been found (Ruvkun G., Perspective: Glimpses of a tiny RNA world, Science 294, 779 (2001)).

[4346] It is yet further appreciated that a function of VGAM313 is inhibition of expression of host target genes, as part of a novel viral mechanism of attacking a host. Accordingly, utilities of VGAM313 include diagnosis, prevention and treatment of viral infection by Vaccinia virus. Specific functions, and accordingly utilities, of VGAM313 correlate with, and may be deduced from, the identity of the host target genes which VGAM313 binds and inhibits, and the function of these host target genes, as elaborated hereinbelow.

[4347] Nucleotide sequences of the VGAM313 precursor RNA, herein designated VGAM PRECURSOR RNA, and of the diced VGAM313 RNA, herein designated VGAM RNA, and a schematic representation of the secondary folding of VGAM313 folded precursor RNA, herein designated VGAM FOLDED PRECURSOR RNA, of VGAM313 are further described hereinbelow with reference to Table 1.

[4348] Nucleotide sequences of host target binding sites, such as BINDING SITE-I, BINDING SITE-II and BINDING SITE-III of FIG. 1, found on, and schematic representation of the complementarity of each of these host target binding sites to VGAM313 RNA, herein designated VGAM RNA, are described hereinbelow with reference to Table 2.

[4349] FIG. 1 further provides a conceptual description of another novel bioinformatically detected viral gene of the present invention, referred to here as Viral Genomic Address Messenger 314 (VGAM314) viral gene, which modulates expression of respective host target genes thereof, the function and utility of which host target genes is known in the art.

[4350] VGAM314 is a novel bioinformatically detected regulatory, non protein coding, viral micro RNA (miRNA) gene. The method by which VGAM314 was detected is described hereinabove with reference to FIGS. 2-8.

[4351] VGAM314 gene, herein designated VGAM GENE, is a viral gene contained in the genome of Vaccinia virus. VGAM314 host target gene, herein designated VGAM HOST TARGET GENE, is a human gene contained in the human genome.

[4352] VGAM314 gene, herein designated VGAM GENE, encodes a VGAM314 precursor RNA, herein designated VGAM PRECURSOR RNA. Similar to other miRNA genes, and unlike most ordinary genes, VGAM314 precursor RNA, herein designated VGAM PRECURSOR RNA, does not encode a protein. A nucleotide sequence identical or highly similar to the nucleotide sequence of VGAM314 precursor RNA is designated SEQ ID:300, and is provided hereinbelow with reference to the sequence listing part. Nucleotide sequence SEQ ID:300 is located at position 10620 relative to the genome of Vaccinia virus.

[4353] VGAM314 precursor RNA, herein designated VGAM PRECURSOR RNA, folds onto itself, forming VGAM314 folded precursor RNA, herein designated VGAM FOLDED PRECURSOR RNA, which has a two-dimensional hairpin structure. As is well known in the art, this hairpin structure, is typical of RNA encoded by miRNA genes, and is due to the fact that the nucleotide sequence of the first half of the RNA encoded by a miRNA gene is an accurate or partial inversed-reversed sequence of the nucleotide sequence of the second half thereof.

[4354] An enzyme complex designated DICER COMPLEX, dices the VGAM314 folded precursor RNA, herein designated VGAM FOLDED PRECURSOR RNA, into VGAM314 RNA, herein designated VGAM RNA, a single stranded ˜22 nt long RNA segment. As is known in the art, dicing of a hairpin structured RNA precursor product into a short ˜22 nt RNA segment is catalyzed by an enzyme complex comprising an enzyme called Dicer together with other necessary proteins. A probable (over 86%) nucleotide sequence of VGAM314 RNA is designated SEQ ID:649, and is provided hereinbelow with reference to the sequence listing part.

[4355] VGAM314 host target gene, herein designated VGAM HOST TARGET GENE, encodes a corresponding messenger RNA, VGAM314 host target RNA, herein designated VGAM HOST TARGET RNA. VGAM314 host target RNA, herein designated VGAM HOST TARGET RNA, comprises three regions, as is typical of mRNA of a protein coding gene: a 5 untranslated region, a protein coding region and a 3 untranslated region, designated 5UTR, PROTEIN CODING and 3UTR respectively.

[4356] VGAM314 RNA, herein designated VGAM RNA, binds complementarily to one or more host target binding sites located in untranslated regions of VGAM314 host target RNA, herein designated VGAM HOST TARGET RNA. This complementary binding is due to the fact that the nucleotide sequence of VGAM314 RNA, herein designated VGAM RNA, is an accurate or a partial inversed-reversed sequence of the nucleotide sequence of each of the host target binding sites. As an illustration, FIG. 1 shows 3 such host target binding sites, designated BINDING SITE I, BINDING SITE II and BINDING SITE III respectively. It is appreciated that the number of host target binding sites shown in FIG. 1 is meant as an illustration only, and is not meant to be limiting VGAM314 RNA, herein designated VGAM RNA, may have a different number of host target binding sites in untranslated regions of a VGAM314 host target RNA, herein designated VGAM HOST TARGET RNA. It is further appreciated that while FIG. 1 depicts host target binding sites in the 3UTR region, this is meant as an example only these host target binding sites may be located in the 3UTR region, the 5UTR region, or in both 3UTR and 5UTR regions.

[4357] The complementary binding of VGAM314 RNA, herein designated VGAM RNA, to host target binding sites on VGAM314 host target RNA, herein designated VGAM HOST TARGET RNA, such as BINDING SITE I, BINDING SITE II and BINDING SITE III, inhibits translation of VGAM314 host target RNA, herein designated VGAM HOST TARGET RNA, into VGAM314 host target protein, herein designated VGAM HOST TARGET PROTEIN. VGAM host target protein is therefore outlined by a broken line.

[4358] It is appreciated that VGAM314 host target gene, herein designated VGAM HOST TARGET GENE, in fact represents a plurality of VGAM314 host target genes. The mRNA of each one of this plurality of VGAM314 host target genes comprises one or more host target binding sites, each having a nucleotide sequence which is at least partly complementary to VGAM314 RNA, herein designated VGAM RNA, and which when bound by VGAM314 RNA, herein designated VGAM RNA, causes inhibition of translation of respective one or more VGAM314 host target proteins.

[4359] It is further appreciated by one skilled in the art that the mode of translational inhibition illustrated by FIG. 1 with specific reference to translational inhibition exerted by VGAM314 gene, herein designated VGAM GENE, on one or more VGAM314 host target gene, herein designated VGAM HOST TARGET GENE, is in fact common to other known non-viral miRNA genes. As mentioned hereinabove with reference to the background section, although a specific complementary binding site has been demonstrated only for some of the known miRNA genes (primarily Lin-4 and Let-7), all other recently discovered miRNA genes are also believed by those skilled in the art to modulate expression of other genes by complementary binding, although specific complementary binding sites of these other miRNA genes have not yet been found (Ruvkun G., Perspective: Glimpses of a tiny RNA world, Science 294, 779 (2001)).

[4360] It is yet further appreciated that a function of VGAM314 is inhibition of expression of host target genes, as part of a novel viral mechanism of attacking a host. Accordingly, utilities of VGAM314 include diagnosis, prevention and treatment of viral infection by Vaccinia virus. Specific functions, and accordingly utilities, of VGAM314 correlate with, and may be deduced from, the identity of the host target genes which VGAM314 binds and inhibits, and the function of these host target genes, as elaborated hereinbelow.

[4361] Nucleotide sequences of the VGAM314 precursor RNA, herein designated VGAM PRECURSOR RNA, and of the diced VGAM314 RNA, herein designated VGAM RNA, and a schematic representation of the secondary folding of VGAM314 folded precursor RNA, herein designated VGAM FOLDED PRECURSOR RNA, of VGAM314 are further described hereinbelow with reference to Table 1.

[4362] Nucleotide sequences of host target binding sites, such as BINDING SITE-I, BINDING SITE-II and BINDING SITE-III of FIG. 1, found on, and schematic representation of the complementarity of each of these host target binding sites to VGAM314 RNA, herein designated VGAM RNA, are described hereinbelow with reference to Table 2.

[4363] FIG. 1 further provides a conceptual description of another novel bioinformatically detected viral gene of the present invention, referred to here as Viral Genomic Address Messenger 315 (VGAM315) viral gene, which modulates expression of respective host target genes thereof, the function and utility of which host target genes is known in the art.

[4364] VGAM315 is a novel bioinformatically detected regulatory, non protein coding, viral micro RNA (miRNA) gene. The method by which VGAM315 was detected is described hereinabove with reference to FIGS. 2-8.

[4365] VGAM315 gene, herein designated VGAM GENE, is a viral gene contained in the genome of Vaccinia virus. VGAM315 host target gene, herein designated VGAM HOST TARGET GENE, is a human gene contained in the human genome.

[4366] VGAM315 gene, herein designated VGAM GENE, encodes a VGAM315 precursor RNA, herein designated VGAM PRECURSOR RNA. Similar to other miRNA genes, and unlike most ordinary genes, VGAM315 precursor RNA, herein designated VGAM PRECURSOR RNA, does not encode a protein. A nucleotide sequence identical or highly similar to the nucleotide sequence of VGAM315 precursor RNA is designated SEQ ID:301, and is provided hereinbelow with reference to the sequence listing part. Nucleotide sequence SEQ ID:301 is located at position 179807 relative to the genome of Vaccinia virus.

[4367] VGAM315 precursor RNA, herein designated VGAM PRECURSOR RNA, folds onto itself, forming VGAM315 folded precursor RNA, herein designated VGAM FOLDED PRECURSOR RNA, which has a two-dimensional hairpin structure. As is well known in the art, this hairpin structure, is typical of RNA encoded by miRNA genes, and is due to the fact that the nucleotide sequence of the first half of the RNA encoded by a miRNA gene is an accurate or partial inversed-reversed sequence of the nucleotide sequence of the second half thereof.

[4368] An enzyme complex designated DICER COMPLEX, dices the VGAM315 folded precursor RNA, herein designated VGAM FOLDED PRECURSOR RNA, into VGAM315 RNA, herein designated VGAM RNA, a single stranded ˜22 nt long RNA segment. As is known in the art, dicing of a hairpin structured RNA precursor product into a short ˜22 nt RNA segment is catalyzed by an enzyme complex comprising an enzyme called Dicer together with other necessary proteins. A probable (over 85%) nucleotide sequence of VGAM315 RNA is designated SEQ ID:650, and is provided hereinbelow with reference to the sequence listing part.

[4369] VGAM315 host target gene, herein designated VGAM HOST TARGET GENE, encodes a corresponding messenger RNA, VGAM315 host target RNA, herein designated VGAM HOST TARGET RNA. VGAM315 host target RNA, herein designated VGAM HOST TARGET RNA, comprises three regions, as is typical of mRNA of a protein coding gene: a 5 untranslated region, a protein coding region and a 3 untranslated region, designated 5UTR, PROTEIN CODING and 3UTR respectively.

[4370] VGAM315 RNA, herein designated VGAM RNA, binds complementarily to one or more host target binding sites located in untranslated regions of VGAM315 host target RNA, herein designated VGAM HOST TARGET RNA. This complementary binding is due to the fact that the nucleotide sequence of VGAM315 RNA, herein designated VGAM RNA, is an accurate or a partial inversed-reversed sequence of the nucleotide sequence of each of the host target binding sites. As an illustration, FIG. 1 shows 3 such host target binding sites, designated BINDING SITE I, BINDING SITE II and BINDING SITE III respectively. It is appreciated that the number of host target binding sites shown in FIG. 1 is meant as an illustration only, and is not meant to be limiting VGAM315 RNA, herein designated VGAM RNA, may have a different number of host target binding sites in untranslated regions of a VGAM315 host target RNA, herein designated VGAM HOST TARGET RNA. It is further appreciated that while FIG. 1 depicts host target binding sites in the 3UTR region, this is meant as an example only these host target binding sites may be located in the 3UTR region, the 5UTR region, or in both 3UTR and 5UTR regions.

[4371] The complementary binding of VGAM315 RNA, herein designated VGAM RNA, to host target binding sites on VGAM315 host target RNA, herein designated VGAM HOST TARGET RNA, such as BINDING SITE I, BINDING SITE II and BINDING SITE III, inhibits translation of VGAM315 host target RNA, herein designated VGAM HOST TARGET RNA, into VGAM315 host target protein, herein designated VGAM HOST TARGET PROTEIN. VGAM host target protein is therefore outlined by a broken line.

[4372] It is appreciated that VGAM315 host target gene, herein designated VGAM HOST TARGET GENE, in fact represents a plurality of VGAM315 host target genes. The mRNA of each one of this plurality of VGAM315 host target genes comprises one or more host target binding sites, each having a nucleotide sequence which is at least partly complementary to VGAM315 RNA, herein designated VGAM RNA, and which when bound by VGAM315 RNA, herein designated VGAM RNA, causes inhibition of translation of respective one or more VGAM315 host target proteins.

[4373] It is further appreciated by one skilled in the art that the mode of translational inhibition illustrated by FIG. 1 with specific reference to translational inhibition exerted by VGAM315 gene, herein designated VGAM GENE, on one or more VGAM315 host target gene, herein designated VGAM HOST TARGET GENE, is in fact common to other known non-viral miRNA genes. As mentioned hereinabove with reference to the background section, although a specific complementary binding site has been demonstrated only for some of the known miRNA genes (primarily Lin-4 and Let-7), all other recently discovered miRNA genes are also believed by those skilled in the art to modulate expression of other genes by complementary binding, although specific complementary binding sites of these other miRNA genes have not yet been found (Ruvkun G., Perspective: Glimpses of a tiny RNA world, Science 294, 779 (2001)).

[4374] It is yet further appreciated that a function of VGAM315 is inhibition of expression of host target genes, as part of a novel viral mechanism of attacking a host. Accordingly, utilities of VGAM315 include diagnosis, prevention and treatment of viral infection by Vaccinia virus. Specific functions, and accordingly utilities, of VGAM315 correlate with, and may be deduced from, the identity of the host target genes which VGAM315 binds and inhibits, and the function of these host target genes, as elaborated hereinbelow.

[4375] Nucleotide sequences of the VGAM315 precursor RNA, herein designated VGAM PRECURSOR RNA, and of the diced VGAM315 RNA, herein designated VGAM RNA, and a schematic representation of the secondary folding of VGAM315 folded precursor RNA, herein designated VGAM FOLDED PRECURSOR RNA, of VGAM315 are further described hereinbelow with reference to Table 1.

[4376] Nucleotide sequences of host target binding sites, such as BINDING SITE-I, BINDING SITE-II and BINDING SITE-III of FIG. 1, found on, and schematic representation of the complementarity of each of these host target binding sites to VGAM315 RNA, herein designated VGAM RNA, are described hereinbelow with reference to Table 2.

[4377] FIG. 1 further provides a conceptual description of another novel bioinformatically detected viral gene of the present invention, referred to here as Viral Genomic Address Messenger 316 (VGAM316) viral gene, which modulates expression of respective host target genes thereof, the function and utility of which host target genes is known in the art.

[4378] VGAM316 is a novel bioinformatically detected regulatory, non protein coding, viral micro RNA (miRNA) gene. The method by which VGAM316 was detected is described hereinabove with reference to FIGS. 2-8.

[4379] VGAM316 gene, herein designated VGAM GENE, is a viral gene contained in the genome of Vaccinia virus. VGAM316 host target gene, herein designated VGAM HOST TARGET GENE, is a human gene contained in the human genome.

[4380] VGAM316 gene, herein designated VGAM GENE, encodes a VGAM316 precursor RNA, herein designated VGAM PRECURSOR RNA. Similar to other miRNA genes, and unlike most ordinary genes, VGAM316 precursor RNA, herein designated VGAM PRECURSOR RNA, does not encode a protein. A nucleotide sequence identical or highly similar to the nucleotide sequence of VGAM316 precursor RNA is designated SEQ ID:302, and is provided hereinbelow with reference to the sequence listing part. Nucleotide sequence SEQ ID:302 is located at position 6123 relative to the genome of Vaccinia virus.

[4381] VGAM316 precursor RNA, herein designated VGAM PRECURSOR RNA, folds onto itself, forming VGAM316 folded precursor RNA, herein designated VGAM FOLDED PRECURSOR RNA, which has a two-dimensional hairpin structure. As is well known in the art, this hairpin structure, is typical of RNA encoded by miRNA genes, and is due to the fact that the nucleotide sequence of the first half of the RNA encoded by a miRNA gene is an accurate or partial inversed-reversed sequence of the nucleotide sequence of the second half thereof.

[4382] An enzyme complex designated DICER COMPLEX, dices the VGAM316 folded precursor RNA, herein designated VGAM FOLDED PRECURSOR RNA, into VGAM316 RNA, herein designated VGAM RNA, a single stranded ˜22 nt long RNA segment. As is known in the art, dicing of a hairpin structured RNA precursor product into a short ˜22 nt RNA segment is catalyzed by an enzyme complex comprising an enzyme called Dicer together with other necessary proteins. A probable (over 83%) nucleotide sequence of VGAM316 RNA is designated SEQ ID:651, and is provided hereinbelow with reference to the sequence listing part.

[4383] VGAM316 host target gene, herein designated VGAM HOST TARGET GENE, encodes a corresponding messenger RNA, VGAM316 host target RNA, herein designated VGAM HOST TARGET RNA. VGAM316 host target RNA, herein designated VGAM HOST TARGET RNA, comprises three regions, as is typical of mRNA of a protein coding gene: a 5 untranslated region, a protein coding region and a 3 untranslated region, designated 5UTR, PROTEIN CODING and 3UTR respectively.

[4384] VGAM316 RNA, herein designated VGAM RNA, binds complementarily to one or more host target binding sites located in untranslated regions of VGAM316 host target RNA, herein designated VGAM HOST TARGET RNA. This complementary binding is due to the fact that the nucleotide sequence of VGAM316 RNA, herein designated VGAM RNA, is an accurate or a partial inversed-reversed sequence of the nucleotide sequence of each of the host target binding sites. As an illustration, FIG. 1 shows 3 such host target binding sites, designated BINDING SITE I, BINDING SITE II and BINDING SITE III respectively. It is appreciated that the number of host target binding sites shown in FIG. 1 is meant as an illustration only, and is not meant to be limiting VGAM316 RNA, herein designated VGAM RNA, may have a different number of host target binding sites in untranslated regions of a VGAM316 host target RNA, herein designated VGAM HOST TARGET RNA. It is further appreciated that while FIG. 1 depicts host target binding sites in the 3UTR region, this is meant as an example only these host target binding sites may be located in the 3UTR region, the 5UTR region, or in both 3UTR and 5UTR regions.

[4385] The complementary binding of VGAM316 RNA, herein designated VGAM RNA, to host target binding sites on VGAM316 host target RNA, herein designated VGAM HOST TARGET RNA, such as BINDING SITE I, BINDING SITE II and BINDING SITE III, inhibits translation of VGAM316 host target RNA, herein designated VGAM HOST TARGET RNA, into VGAM316 host target protein, herein designated VGAM HOST TARGET PROTEIN. VGAM host target protein is therefore outlined by a broken line.

[4386] It is appreciated that VGAM316 host target gene, herein designated VGAM HOST TARGET GENE, in fact represents a plurality of VGAM316 host target genes. The mRNA of each one of this plurality of VGAM316 host target genes comprises one or more host target binding sites, each having a nucleotide sequence which is at least partly complementary to VGAM316 RNA, herein designated VGAM RNA, and which when bound by VGAM316 RNA, herein designated VGAM RNA, causes inhibition of translation of respective one or more VGAM316 host target proteins.

[4387] It is further appreciated by one skilled in the art that the mode of translational inhibition illustrated by FIG. 1 with specific reference to translational inhibition exerted by VGAM316 gene, herein designated VGAM GENE, on one or more VGAM316 host target gene, herein designated VGAM HOST TARGET GENE, is in fact common to other known non-viral miRNA genes. As mentioned hereinabove with reference to the background section, although a specific complementary binding site has been demonstrated only for some of the known miRNA genes (primarily Lin-4 and Let-7), all other recently discovered miRNA genes are also believed by those skilled in the art to modulate expression of other genes by complementary binding, although specific complementary binding sites of these other miRNA genes have not yet been found (Ruvkun G., Perspective: Glimpses of a tiny RNA world, Science 294, 779 (2001)).

[4388] It is yet further appreciated that a function of VGAM316 is inhibition of expression of host target genes, as part of a novel viral mechanism of attacking a host. Accordingly, utilities of VGAM316 include diagnosis, prevention and treatment of viral infection by Vaccinia virus. Specific functions, and accordingly utilities, of VGAM316 correlate with, and may be deduced from, the identity of the host target genes which VGAM316 binds and inhibits, and the function of these host target genes, as elaborated hereinbelow.

[4389] Nucleotide sequences of the VGAM316 precursor RNA, herein designated VGAM PRECURSOR RNA, and of the diced VGAM316 RNA, herein designated VGAM RNA, and a schematic representation of the secondary folding of VGAM316 folded precursor RNA, herein designated VGAM FOLDED PRECURSOR RNA, of VGAM316 are further described hereinbelow with reference to Table 1.

[4390] Nucleotide sequences of host target binding sites, such as BINDING SITE-I, BINDING SITE-II and BINDING SITE-III of FIG. 1, found on, and schematic representation of the complementarity of each of these host target binding sites to VGAM316 RNA, herein designated VGAM RNA, are described hereinbelow with reference to Table 2.

[4391] FIG. 1 further provides a conceptual description of another novel bioinformatically detected viral gene of the present invention, referred to here as Viral Genomic Address Messenger 317 (VGAM317) viral gene, which modulates expression of respective host target genes thereof, the function and utility of which host target genes is known in the art.

[4392] VGAM317 is a novel bioinformatically detected regulatory, non protein coding, viral micro RNA (miRNA) gene. The method by which VGAM317 was detected is described hereinabove with reference to FIGS. 2-8.

[4393] VGAM317 gene, herein designated VGAM GENE, is a viral gene contained in the genome of Vaccinia virus. VGAM317 host target gene, herein designated VGAM HOST TARGET GENE, is a human gene contained in the human genome.

[4394] VGAM317 gene, herein designated VGAM GENE, encodes a VGAM317 precursor RNA, herein designated VGAM PRECURSOR RNA. Similar to other miRNA genes, and unlike most ordinary genes, VGAM317 precursor RNA, herein designated VGAM PRECURSOR RNA, does not encode a protein. A nucleotide sequence identical or highly similar to the nucleotide sequence of VGAM317 precursor RNA is designated SEQ ID:303, and is provided hereinbelow with reference to the sequence listing part. Nucleotide sequence SEQ ID:303 is located at position 6573 relative to the genome of Vaccinia virus.

[4395] VGAM317 precursor RNA, herein designated VGAM PRECURSOR RNA, folds onto itself, forming VGAM317 folded precursor RNA, herein designated VGAM FOLDED PRECURSOR RNA, which has a two-dimensional hairpin structure. As is well known in the art, this hairpin structure, is typical of RNA encoded by miRNA genes, and is due to the fact that the nucleotide sequence of the first half of the RNA encoded by a miRNA gene is an accurate or partial inversed-reversed sequence of the nucleotide sequence of the second half thereof.

[4396] An enzyme complex designated DICER COMPLEX, dices the VGAM317 folded precursor RNA, herein designated VGAM FOLDED PRECURSOR RNA, into VGAM317 RNA, herein designated VGAM RNA, a single stranded ˜22 nt long RNA segment. As is known in the art, dicing of a hairpin structured RNA precursor product into a short ˜22 nt RNA segment is catalyzed by an enzyme complex comprising an enzyme called Dicer together with other necessary proteins. A probable (over 80%) nucleotide sequence of VGAM317 RNA is designated SEQ ID:652, and is provided hereinbelow with reference to the sequence listing part.

[4397] VGAM317 host target gene, herein designated VGAM HOST TARGET GENE, encodes a corresponding messenger RNA, VGAM317 host target RNA, herein designated VGAM HOST TARGET RNA. VGAM317 host target RNA, herein designated VGAM HOST TARGET RNA, comprises three regions, as is typical of mRNA of a protein coding gene: a 5 untranslated region, a protein coding region and a 3 untranslated region, designated 5UTR, PROTEIN CODING and 3UTR respectively.

[4398] VGAM317 RNA, herein designated VGAM RNA, binds complementarily to one or more host target binding sites located in untranslated regions of VGAM317 host target RNA, herein designated VGAM HOST TARGET RNA. This complementary binding is due to the fact that the nucleotide sequence of VGAM317 RNA, herein designated VGAM RNA, is an accurate or a partial inversed-reversed sequence of the nucleotide sequence of each of the host target binding sites. As an illustration, FIG. 1 shows 3 such host target binding sites, designated BINDING SITE I, BINDING SITE II and BINDING SITE III respectively. It is appreciated that the number of host target binding sites shown in FIG. 1 is meant as an illustration only, and is not meant to be limiting VGAM317 RNA, herein designated VGAM RNA, may have a different number of host target binding sites in untranslated regions of a VGAM317 host target RNA, herein designated VGAM HOST TARGET RNA. It is further appreciated that while FIG. 1 depicts host target binding sites in the 3UTR region, this is meant as an example only these host target binding sites may be located in the 3UTR region, the 5UTR region, or in both 3UTR and 5UTR regions.

[4399] The complementary binding of VGAM317 RNA, herein designated VGAM RNA, to host target binding sites on VGAM317 host target RNA, herein designated VGAM HOST TARGET RNA, such as BINDING SITE I, BINDING SITE II and BINDING SITE III, inhibits translation of VGAM317 host target RNA, herein designated VGAM HOST TARGET RNA, into VGAM317 host target protein, herein designated VGAM HOST TARGET PROTEIN. VGAM host target protein is therefore outlined by a broken line.

[4400] It is appreciated that VGAM317 host target gene, herein designated VGAM HOST TARGET GENE, in fact represents a plurality of VGAM317 host target genes. The mRNA of each one of this plurality of VGAM317 host target genes comprises one or more host target binding sites, each having a nucleotide sequence which is at least partly complementary to VGAM317 RNA, herein designated VGAM RNA, and which when bound by VGAM317 RNA, herein designated VGAM RNA, causes inhibition of translation of respective one or more VGAM317 host target proteins.

[4401] It is further appreciated by one skilled in the art that the mode of translational inhibition illustrated by FIG. 1 with specific reference to translational inhibition exerted by VGAM317 gene, herein designated VGAM GENE, on one or more VGAM317 host target gene, herein designated VGAM HOST TARGET GENE, is in fact common to other known non-viral miRNA genes. As mentioned hereinabove with reference to the background section, although a specific complementary binding site has been demonstrated only for some of the known miRNA genes (primarily Lin-4 and Let-7), all other recently discovered miRNA genes are also believed by those skilled in the art to modulate expression of other genes by complementary binding, although specific complementary binding sites of these other miRNA genes have not yet been found (Ruvkun G., Perspective: Glimpses of a tiny RNA world, Science 294, 779 (2001)).

[4402] It is yet further appreciated that a function of VGAM317 is inhibition of expression of host target genes, as part of a novel viral mechanism of attacking a host. Accordingly, utilities of VGAM317 include diagnosis, prevention and treatment of viral infection by Vaccinia virus. Specific functions, and accordingly utilities, of VGAM317 correlate with, and may be deduced from, the identity of the host target genes which VGAM317 binds and inhibits, and the function of these host target genes, as elaborated hereinbelow.

[4403] Nucleotide sequences of the VGAM317 precursor RNA, herein designated VGAM PRECURSOR RNA, and of the diced VGAM317 RNA, herein designated VGAM RNA, and a schematic representation of the secondary folding of VGAM317 folded precursor RNA, herein designated VGAM FOLDED PRECURSOR RNA, of VGAM317 are further described hereinbelow with reference to Table 1.

[4404] Nucleotide sequences of host target binding sites, such as BINDING SITE-I, BINDING SITE-II and BINDING SITE-III of FIG. 1, found on, and schematic representation of the complementarity of each of these host target binding sites to VGAM317 RNA, herein designated VGAM RNA, are described hereinbelow with reference to Table 2.

[4405] FIG. 1 further provides a conceptual description of another novel bioinformatically detected viral gene of the present invention, referred to here as Viral Genomic Address Messenger 318 (VGAM318) viral gene, which modulates expression of respective host target genes thereof, the function and utility of which host target genes is known in the art.

[4406] VGAM318 is a novel bioinformatically detected regulatory, non protein coding, viral micro RNA (miRNA) gene. The method by which VGAM318 was detected is described hereinabove with reference to FIGS. 2-8.

[4407] VGAM318 gene, herein designated VGAM GENE, is a viral gene contained in the genome of Vaccinia virus. VGAM318 host target gene, herein designated VGAM HOST TARGET GENE, is a human gene contained in the human genome.

[4408] VGAM318 gene, herein designated VGAM GENE, encodes a VGAM318 precursor RNA, herein designated VGAM PRECURSOR RNA. Similar to other miRNA genes, and unlike most ordinary genes, VGAM318 precursor RNA, herein designated VGAM PRECURSOR RNA, does not encode a protein. A nucleotide sequence identical or highly similar to the nucleotide sequence of VGAM318 precursor RNA is designated SEQ ID:304, and is provided hereinbelow with reference to the sequence listing part. Nucleotide sequence SEQ ID:304 is located at position 5257 relative to the genome of Vaccinia virus.

[4409] VGAM318 precursor RNA, herein designated VGAM PRECURSOR RNA, folds onto itself, forming VGAM318 folded precursor RNA, herein designated VGAM FOLDED PRECURSOR RNA, which has a two-dimensional hairpin structure. As is well known in the art, this hairpin structure, is typical of RNA encoded by miRNA genes, and is due to the fact that the nucleotide sequence of the first half of the RNA encoded by a miRNA gene is an accurate or partial inversed-reversed sequence of the nucleotide sequence of the second half thereof.

[4410] An enzyme complex designated DICER COMPLEX, dices the VGAM318 folded precursor RNA, herein designated VGAM FOLDED PRECURSOR RNA, into VGAM318 RNA, herein designated VGAM RNA, a single stranded ˜22 nt long RNA segment. As is known in the art, dicing of a hairpin structured RNA precursor product into a short ˜22 nt RNA segment is catalyzed by an enzyme complex comprising an enzyme called Dicer together with other necessary proteins. A probable (over 83%) nucleotide sequence of VGAM318 RNA is designated SEQ ID:653, and is provided hereinbelow with reference to the sequence listing part.

[4411] VGAM318 host target gene, herein designated VGAM HOST TARGET GENE, encodes a corresponding messenger RNA, VGAM318 host target RNA, herein designated VGAM HOST TARGET RNA. VGAM318 host target RNA, herein designated VGAM HOST TARGET RNA, comprises three regions, as is typical of mRNA of a protein coding gene: a 5 untranslated region, a protein coding region and a 3 untranslated region, designated 5UTR, PROTEIN CODING and 3UTR respectively.

[4412] VGAM318 RNA, herein designated VGAM RNA, binds complementarily to one or more host target binding sites located in untranslated regions of VGAM318 host target RNA, herein designated VGAM HOST TARGET RNA. This complementary binding is due to the fact that the nucleotide sequence of VGAM318 RNA, herein designated VGAM RNA, is an accurate or a partial inversed-reversed sequence of the nucleotide sequence of each of the host target binding sites. As an illustration, FIG. 1 shows 3 such host target binding sites, designated BINDING SITE I, BINDING SITE II and BINDING SITE III respectively. It is appreciated that the number of host target binding sites shown in FIG. 1 is meant as an illustration only, and is not meant to be limiting VGAM318 RNA, herein designated VGAM RNA, may have a different number of host target binding sites in untranslated regions of a VGAM318 host target RNA, herein designated VGAM HOST TARGET RNA. It is further appreciated that while FIG. 1 depicts host target binding sites in the 3UTR region, this is meant as an example only these host target binding sites may be located in the 3UTR region, the 5UTR region, or in both 3UTR and 5UTR regions.

[4413] The complementary binding of VGAM318 RNA, herein designated VGAM RNA, to host target binding sites on VGAM318 host target RNA, herein designated VGAM HOST TARGET RNA, such as BINDING SITE I, BINDING SITE II and BINDING SITE III, inhibits translation of VGAM318 host target RNA, herein designated VGAM HOST TARGET RNA, into VGAM318 host target protein, herein designated VGAM HOST TARGET PROTEIN. VGAM host target protein is therefore outlined by a broken line.

[4414] It is appreciated that VGAM318 host target gene, herein designated VGAM HOST TARGET GENE, in fact represents a plurality of VGAM318 host target genes. The mRNA of each one of this plurality of VGAM318 host target genes comprises one or more host target binding sites, each having a nucleotide sequence which is at least partly complementary to VGAM318 RNA, herein designated VGAM RNA, and which when bound by VGAM318 RNA, herein designated VGAM RNA, causes inhibition of translation of respective one or more VGAM318 host target proteins.

[4415] It is further appreciated by one skilled in the art that the mode of translational inhibition illustrated by FIG. 1 with specific reference to translational inhibition exerted by VGAM318 gene, herein designated VGAM GENE, on one or more VGAM318 host target gene, herein designated VGAM HOST TARGET GENE, is in fact common to other known non-viral miRNA genes. As mentioned hereinabove with reference to the background section, although a specific complementary binding site has been demonstrated only for some of the known miRNA genes (primarily Lin-4 and Let-7), all other recently discovered miRNA genes are also believed by those skilled in the art to modulate expression of other genes by complementary binding, although specific complementary binding sites of these other miRNA genes have not yet been found (Ruvkun G., Perspective: Glimpses of a tiny RNA world, Science 294, 779 (2001)).

[4416] It is yet further appreciated that a function of VGAM318 is inhibition of expression of host target genes, as part of a novel viral mechanism of attacking a host. Accordingly, utilities of VGAM318 include diagnosis, prevention and treatment of viral infection by Vaccinia virus. Specific functions, and accordingly utilities, of VGAM318 correlate with, and may be deduced from, the identity of the host target genes which VGAM318 binds and inhibits, and the function of these host target genes, as elaborated hereinbelow.

[4417] Nucleotide sequences of the VGAM318 precursor RNA, herein designated VGAM PRECURSOR RNA, and of the diced VGAM318 RNA, herein designated VGAM RNA, and a schematic representation of the secondary folding of VGAM318 folded precursor RNA, herein designated VGAM FOLDED PRECURSOR RNA, of VGAM318 are further described hereinbelow with reference to Table 1.

[4418] Nucleotide sequences of host target binding sites, such as BINDING SITE-I, BINDING SITE-II and BINDING SITE-III of FIG. 1, found on, and schematic representation of the complementarity of each of these host target binding sites to VGAM318 RNA, herein designated VGAM RNA, are described hereinbelow with reference to Table 2.

[4419] FIG. 1 further provides a conceptual description of another novel bioinformatically detected viral gene of the present invention, referred to here as Viral Genomic Address Messenger 319 (VGAM319) viral gene, which modulates expression of respective host target genes thereof, the function and utility of which host target genes is known in the art.

[4420] VGAM319 is a novel bioinformatically detected regulatory, non protein coding, viral micro RNA (miRNA) gene. The method by which VGAM319 was detected is described hereinabove with reference to FIGS. 2-8.

[4421] VGAM319 gene, herein designated VGAM GENE, is a viral gene contained in the genome of Vaccinia virus. VGAM319 host target gene, herein designated VGAM HOST TARGET GENE, is a human gene contained in the human genome.

[4422] VGAM319 gene, herein designated VGAM GENE, encodes a VGAM319 precursor RNA, herein designated VGAM PRECURSOR RNA. Similar to other miRNA genes, and unlike most ordinary genes, VGAM319 precursor RNA, herein designated VGAM PRECURSOR RNA, does not encode a protein. A nucleotide sequence identical or highly similar to the nucleotide sequence of VGAM319 precursor RNA is designated SEQ ID:305, and is provided hereinbelow with reference to the sequence listing part. Nucleotide sequence SEQ ID:305 is located at position 4867 relative to the genome of Vaccinia virus.

[4423] VGAM319 precursor RNA, herein designated VGAM PRECURSOR RNA, folds onto itself, forming VGAM319 folded precursor RNA, herein designated VGAM FOLDED PRECURSOR RNA, which has a two-dimensional hairpin structure. As is well known in the art, this hairpin structure, is typical of RNA encoded by miRNA genes, and is due to the fact that the nucleotide sequence of the first half of the RNA encoded by a miRNA gene is an accurate or partial inversed-reversed sequence of the nucleotide sequence of the second half thereof.

[4424] An enzyme complex designated DICER COMPLEX, dices the VGAM319 folded precursor RNA, herein designated VGAM FOLDED PRECURSOR RNA, into VGAM319 RNA, herein designated VGAM RNA, a single stranded ˜22 nt long RNA segment. As is known in the art, dicing of a hairpin structured RNA precursor product into a short ˜22 nt RNA segment is catalyzed by an enzyme complex comprising an enzyme called Dicer together with other necessary proteins. A probable (over 82%) nucleotide sequence of VGAM319 RNA is designated SEQ ID:654, and is provided hereinbelow with reference to the sequence listing part.

[4425] VGAM319 host target gene, herein designated VGAM HOST TARGET GENE, encodes a corresponding messenger RNA, VGAM319 host target RNA, herein designated VGAM HOST TARGET RNA. VGAM319 host target RNA, herein designated VGAM HOST TARGET RNA, comprises three regions, as is typical of mRNA of a protein coding gene: a 5 untranslated region, a protein coding region and a 3 untranslated region, designated 5UTR, PROTEIN CODING and 3UTR respectively.

[4426] VGAM319 RNA, herein designated VGAM RNA, binds complementarily to one or more host target binding sites located in untranslated regions of VGAM319 host target RNA, herein designated VGAM HOST TARGET RNA. This complementary binding is due to the fact that the nucleotide sequence of VGAM319 RNA, herein designated VGAM RNA, is an accurate or a partial inversed-reversed sequence of the nucleotide sequence of each of the host target binding sites. As an illustration, FIG. 1 shows 3 such host target binding sites, designated BINDING SITE I, BINDING SITE II and BINDING SITE III respectively. It is appreciated that the number of host target binding sites shown in FIG. 1 is meant as an illustration only, and is not meant to be limiting VGAM319 RNA, herein designated VGAM RNA, may have a different number of host target binding sites in untranslated regions of a VGAM319 host target RNA, herein designated VGAM HOST TARGET RNA. It is further appreciated that while FIG. 1 depicts host target binding sites in the 3UTR region, this is meant as an example only these host target binding sites may be located in the 3UTR region, the 5UTR region, or in both 3UTR and 5UTR regions.

[4427] The complementary binding of VGAM319 RNA, herein designated VGAM RNA, to host target binding sites on VGAM319 host target RNA, herein designated VGAM HOST TARGET RNA, such as BINDING SITE I, BINDING SITE II and BINDING SITE III, inhibits translation of VGAM319 host target RNA, herein designated VGAM HOST TARGET RNA, into VGAM319 host target protein, herein designated VGAM HOST TARGET PROTEIN. VGAM host target protein is therefore outlined by a broken line.

[4428] It is appreciated that VGAM319 host target gene, herein designated VGAM HOST TARGET GENE, in fact represents a plurality of VGAM319 host target genes. The mRNA of each one of this plurality of VGAM319 host target genes comprises one or more host target binding sites, each having a nucleotide sequence which is at least partly complementary to VGAM319 RNA, herein designated VGAM RNA, and which when bound by VGAM319 RNA, herein designated VGAM RNA, causes inhibition of translation of respective one or more VGAM319 host target proteins.

[4429] It is further appreciated by one skilled in the art that the mode of translational inhibition illustrated by FIG. 1 with specific reference to translational inhibition exerted by VGAM319 gene, herein designated VGAM GENE, on one or more VGAM319 host target gene, herein designated VGAM HOST TARGET GENE, is in fact common to other known non-viral miRNA genes. As mentioned hereinabove with reference to the background section, although a specific complementary binding site has been demonstrated only for some of the known miRNA genes (primarily Lin-4 and Let-7), all other recently discovered miRNA genes are also believed by those skilled in the art to modulate expression of other genes by complementary binding, although specific complementary binding sites of these other miRNA genes have not yet been found (Ruvkun G., Perspective: Glimpses of a tiny RNA world, Science 294, 779 (2001)).

[4430] It is yet further appreciated that a function of VGAM319 is inhibition of expression of host target genes, as part of a novel viral mechanism of attacking a host. Accordingly, utilities of VGAM319 include diagnosis, prevention and treatment of viral infection by Vaccinia virus. Specific functions, and accordingly utilities, of VGAM319 correlate with, and may be deduced from, the identity of the host target genes which VGAM319 binds and inhibits, and the function of these host target genes, as elaborated hereinbelow.

[4431] Nucleotide sequences of the VGAM319 precursor RNA, herein designated VGAM PRECURSOR RNA, and of the diced VGAM319 RNA, herein designated VGAM RNA, and a schematic representation of the secondary folding of VGAM319 folded precursor RNA, herein designated VGAM FOLDED PRECURSOR RNA, of VGAM319 are further described hereinbelow with reference to Table 1.

[4432] Nucleotide sequences of host target binding sites, such as BINDING SITE-I, BINDING SITE-II and BINDING SITE-III of FIG. 1, found on, and schematic representation of the complementarity of each of these host target binding sites to VGAM319 RNA, herein designated VGAM RNA, are described hereinbelow with reference to Table 2.

[4433] FIG. 1 further provides a conceptual description of another novel bioinformatically detected viral gene of the present invention, referred to here as Viral Genomic Address Messenger 320 (VGAM320) viral gene, which modulates expression of respective host target genes thereof, the function and utility of which host target genes is known in the art.

[4434] VGAM320 is a novel bioinformatically detected regulatory, non protein coding, viral micro RNA (miRNA) gene. The method by which VGAM320 was detected is described hereinabove with reference to FIGS. 2-8.

[4435] VGAM320 gene, herein designated VGAM GENE, is a viral gene contained in the genome of Vaccinia virus. VGAM320 host target gene, herein designated VGAM HOST TARGET GENE, is a human gene contained in the human genome.

[4436] VGAM320 gene, herein designated VGAM GENE, encodes a VGAM320 precursor RNA, herein designated VGAM PRECURSOR RNA. Similar to other miRNA genes, and unlike most ordinary genes, VGAM320 precursor RNA, herein designated VGAM PRECURSOR RNA, does not encode a protein. A nucleotide sequence identical or highly similar to the nucleotide sequence of VGAM320 precursor RNA is designated SEQ ID:306, and is provided hereinbelow with reference to the sequence listing part. Nucleotide sequence SEQ ID:306 is located at position 190678 relative to the genome of Vaccinia virus.

[4437] VGAM320 precursor RNA, herein designated VGAM PRECURSOR RNA, folds onto itself, forming VGAM320 folded precursor RNA, herein designated VGAM FOLDED PRECURSOR RNA, which has a two-dimensional hairpin structure. As is well known in the art, this hairpin structure, is typical of RNA encoded by miRNA genes, and is due to the fact that the nucleotide sequence of the first half of the RNA encoded by a miRNA gene is an accurate or partial inversed-reversed sequence of the nucleotide sequence of the second half thereof.

[4438] An enzyme complex designated DICER COMPLEX, dices the VGAM320 folded precursor RNA, herein designated VGAM FOLDED PRECURSOR RNA, into VGAM320 RNA, herein designated VGAM RNA, a single stranded ˜22 nt long RNA segment. As is known in the art, dicing of a hairpin structured RNA precursor product into a short ˜22 nt RNA segment is catalyzed by an enzyme complex comprising an enzyme called Dicer together with other necessary proteins. A probable (over 83%) nucleotide sequence of VGAM320 RNA is designated SEQ ID:655, and is provided hereinbelow with reference to the sequence listing part.

[4439] VGAM320 host target gene, herein designated VGAM HOST TARGET GENE, encodes a corresponding messenger RNA, VGAM320 host target RNA, herein designated VGAM HOST TARGET RNA. VGAM320 host target RNA, herein designated VGAM HOST TARGET RNA, comprises three regions, as is typical of mRNA of a protein coding gene: a 5 untranslated region, a protein coding region and a 3 untranslated region, designated 5UTR, PROTEIN CODING and 3UTR respectively.

[4440] VGAM320 RNA, herein designated VGAM RNA, binds complementarily to one or more host target binding sites located in untranslated regions of VGAM320 host target RNA, herein designated VGAM HOST TARGET RNA. This complementary binding is due to the fact that the nucleotide sequence of VGAM320 RNA, herein designated VGAM RNA, is an accurate or a partial inversed-reversed sequence of the nucleotide sequence of each of the host target binding sites. As an illustration, FIG. 1 shows 3 such host target binding sites, designated BINDING SITE I, BINDING SITE II and BINDING SITE III respectively. It is appreciated that the number of host target binding sites shown in FIG. 1 is meant as an illustration only, and is not meant to be limiting VGAM320 RNA, herein designated VGAM RNA, may have a different number of host target binding sites in untranslated regions of a VGAM320 host target RNA, herein designated VGAM HOST TARGET RNA. It is further appreciated that while FIG. 1 depicts host target binding sites in the 3UTR region, this is meant as an example only these host target binding sites may be located in the 3UTR region, the 5UTR region, or in both 3UTR and 5UTR regions.

[4441] The complementary binding of VGAM320 RNA, herein designated VGAM RNA, to host target binding sites on VGAM320 host target RNA, herein designated VGAM HOST TARGET RNA, such as BINDING SITE I, BINDING SITE II and BINDING SITE III, inhibits translation of VGAM320 host target RNA, herein designated VGAM HOST TARGET RNA, into VGAM320 host target protein, herein designated VGAM HOST TARGET PROTEIN. VGAM host target protein is therefore outlined by a broken line.

[4442] It is appreciated that VGAM320 host target gene, herein designated VGAM HOST TARGET GENE, in fact represents a plurality of VGAM320 host target genes. The mRNA of each one of this plurality of VGAM320 host target genes comprises one or more host target binding sites, each having a nucleotide sequence which is at least partly complementary to VGAM320 RNA, herein designated VGAM RNA, and which when bound by VGAM320 RNA, herein designated VGAM RNA, causes inhibition of translation of respective one or more VGAM320 host target proteins.

[4443] It is further appreciated by one skilled in the art that the mode of translational inhibition illustrated by FIG. 1 with specific reference to translational inhibition exerted by VGAM320 gene, herein designated VGAM GENE, on one or more VGAM320 host target gene, herein designated VGAM HOST TARGET GENE, is in fact common to other known non-viral miRNA genes. As mentioned hereinabove with reference to the background section, although a specific complementary binding site has been demonstrated only for some of the known miRNA genes (primarily Lin-4 and Let-7), all other recently discovered miRNA genes are also believed by those skilled in the art to modulate expression of other genes by complementary binding, although specific complementary binding sites of these other miRNA genes have not yet been found (Ruvkun G., Perspective: Glimpses of a tiny RNA world, Science 294, 779 (2001)).

[4444] It is yet further appreciated that a function of VGAM320 is inhibition of expression of host target genes, as part of a novel viral mechanism of attacking a host. Accordingly, utilities of VGAM320 include diagnosis, prevention and treatment of viral infection by Vaccinia virus. Specific functions, and accordingly utilities, of VGAM320 correlate with, and may be deduced from, the identity of the host target genes which VGAM320 binds and inhibits, and the function of these host target genes, as elaborated hereinbelow.

[4445] Nucleotide sequences of the VGAM320 precursor RNA, herein designated VGAM PRECURSOR RNA, and of the diced VGAM320 RNA, herein designated VGAM RNA, and a schematic representation of the secondary folding of VGAM320 folded precursor RNA, herein designated VGAM FOLDED PRECURSOR RNA, of VGAM320 are further described hereinbelow with reference to Table 1.

[4446] Nucleotide sequences of host target binding sites, such as BINDING SITE-I, BINDING SITE-II and BINDING SITE-III of FIG. 1, found on, and schematic representation of the complementarity of each of these host target binding sites to VGAM320 RNA, herein designated VGAM RNA, are described hereinbelow with reference to Table 2.

[4447] FIG. 1 further provides a conceptual description of another novel bioinformatically detected viral gene of the present invention, referred to here as Viral Genomic Address Messenger 321 (VGAM321) viral gene, which modulates expression of respective host target genes thereof, the function and utility of which host target genes is known in the art.

[4448] VGAM321 is a novel bioinformatically detected regulatory, non protein coding, viral micro RNA (miRNA) gene. The method by which VGAM321 was detected is described hereinabove with reference to FIGS. 2-8.

[4449] VGAM321 gene, herein designated VGAM GENE, is a viral gene contained in the genome of Vaccinia virus. VGAM321 host target gene, herein designated VGAM HOST TARGET GENE, is a human gene contained in the human genome.

[4450] VGAM321 gene, herein designated VGAM GENE, encodes a VGAM321 precursor RNA, herein designated VGAM PRECURSOR RNA. Similar to other miRNA genes, and unlike most ordinary genes, VGAM321 precursor RNA, herein designated VGAM PRECURSOR RNA, does not encode a protein. A nucleotide sequence identical or highly similar to the nucleotide sequence of VGAM321 precursor RNA is designated SEQ ID:307, and is provided hereinbelow with reference to the sequence listing part. Nucleotide sequence SEQ ID:307 is located at position 188927 relative to the genome of Vaccinia virus.

[4451] VGAM321 precursor RNA, herein designated VGAM PRECURSOR RNA, folds onto itself, forming VGAM321 folded precursor RNA, herein designated VGAM FOLDED PRECURSOR RNA, which has a two-dimensional hairpin structure. As is well known in the art, this hairpin structure, is typical of RNA encoded by miRNA genes, and is due to the fact that the nucleotide sequence of the first half of the RNA encoded by a miRNA gene is an accurate or partial inversed-reversed sequence of the nucleotide sequence of the second half thereof.

[4452] An enzyme complex designated DICER COMPLEX, dices the VGAM321 folded precursor RNA, herein designated VGAM FOLDED PRECURSOR RNA, into VGAM321 RNA, herein designated VGAM RNA, a single stranded ˜22 nt long RNA segment. As is known in the art, dicing of a hairpin structured RNA precursor product into a short ˜22 nt RNA segment is catalyzed by an enzyme complex comprising an enzyme called Dicer together with other necessary proteins. A probable (over 84%) nucleotide sequence of VGAM321 RNA is designated SEQ ID:656, and is provided hereinbelow with reference to the sequence listing part.

[4453] VGAM321 host target gene, herein designated VGAM HOST TARGET GENE, encodes a corresponding messenger RNA, VGAM321 host target RNA, herein designated VGAM HOST TARGET RNA. VGAM321 host target RNA, herein designated VGAM HOST TARGET RNA, comprises three regions, as is typical of mRNA of a protein coding gene: a 5 untranslated region, a protein coding region and a 3 untranslated region, designated 5UTR, PROTEIN CODING and 3UTR respectively.

[4454] VGAM321 RNA, herein designated VGAM RNA, binds complementarily to one or more host target binding sites located in untranslated regions of VGAM321 host target RNA, herein designated VGAM HOST TARGET RNA. This complementary binding is due to the fact that the nucleotide sequence of VGAM321 RNA, herein designated VGAM RNA, is an accurate or a partial inversed-reversed sequence of the nucleotide sequence of each of the host target binding sites. As an illustration, FIG. 1 shows 3 such host target binding sites, designated BINDING SITE I, BINDING SITE II and BINDING SITE III respectively. It is appreciated that the number of host target binding sites shown in FIG. 1 is meant as an illustration only, and is not meant to be limiting VGAM321 RNA, herein designated VGAM RNA, may have a different number of host target binding sites in untranslated regions of a VGAM321 host target RNA, herein designated VGAM HOST TARGET RNA. It is further appreciated that while FIG. 1 depicts host target binding sites in the 3UTR region, this is meant as an example only these host target binding sites may be located in the 3UTR region, the 5UTR region, or in both 3UTR and 5UTR regions.

[4455] The complementary binding of VGAM321 RNA, herein designated VGAM RNA, to host target binding sites on VGAM321 host target RNA, herein designated VGAM HOST TARGET RNA, such as BINDING SITE I, BINDING SITE II and BINDING SITE III, inhibits translation of VGAM321 host target RNA, herein designated VGAM HOST TARGET RNA, into VGAM321 host target protein, herein designated VGAM HOST TARGET PROTEIN. VGAM host target protein is therefore outlined by a broken line.

[4456] It is appreciated that VGAM321 host target gene, herein designated VGAM HOST TARGET GENE, in fact represents a plurality of VGAM321 host target genes. The mRNA of each one of this plurality of VGAM321 host target genes comprises one or more host target binding sites, each having a nucleotide sequence which is at least partly complementary to VGAM321 RNA, herein designated VGAM RNA, and which when bound by VGAM321 RNA, herein designated VGAM RNA, causes inhibition of translation of respective one or more VGAM321 host target proteins.

[4457] It is further appreciated by one skilled in the art that the mode of translational inhibition illustrated by FIG. 1 with specific reference to translational inhibition exerted by VGAM321 gene, herein designated VGAM GENE, on one or more VGAM321 host target gene, herein designated VGAM HOST TARGET GENE, is in fact common to other known non-viral miRNA genes. As mentioned hereinabove with reference to the background section, although a specific complementary binding site has been demonstrated only for some of the known miRNA genes (primarily Lin-4 and Let-7), all other recently discovered miRNA genes are also believed by those skilled in the art to modulate expression of other genes by complementary binding, although specific complementary binding sites of these other miRNA genes have not yet been found (Ruvkun G., Perspective: Glimpses of a tiny RNA world, Science 294, 779 (2001)).

[4458] It is yet further appreciated that a function of VGAM321 is inhibition of expression of host target genes, as part of a novel viral mechanism of attacking a host. Accordingly, utilities of VGAM321 include diagnosis, prevention and treatment of viral infection by Vaccinia virus. Specific functions, and accordingly utilities, of VGAM321 correlate with, and may be deduced from, the identity of the host target genes which VGAM321 binds and inhibits, and the function of these host target genes, as elaborated hereinbelow.

[4459] Nucleotide sequences of the VGAM321 precursor RNA, herein designated VGAM PRECURSOR RNA, and of the diced VGAM321 RNA, herein designated VGAM RNA, and a schematic representation of the secondary folding of VGAM321 folded precursor RNA, herein designated VGAM FOLDED PRECURSOR RNA, of VGAM321 are further described hereinbelow with reference to Table 1.

[4460] Nucleotide sequences of host target binding sites, such as BINDING SITE-I, BINDING SITE-II and BINDING SITE-III of FIG. 1, found on, and schematic representation of the complementarity of each of these host target binding sites to VGAM321 RNA, herein designated VGAM RNA, are described hereinbelow with reference to Table 2.

[4461] FIG. 1 further provides a conceptual description of another novel bioinformatically detected viral gene of the present invention, referred to here as Viral Genomic Address Messenger 322 (VGAM322) viral gene, which modulates expression of respective host target genes thereof, the function and utility of which host target genes is known in the art.

[4462] VGAM322 is a novel bioinformatically detected regulatory, non protein coding, viral micro RNA (miRNA) gene. The method by which VGAM322 was detected is described hereinabove with reference to FIGS. 2-8.

[4463] VGAM322 gene, herein designated VGAM GENE, is a viral gene contained in the genome of Vaccinia virus. VGAM322 host target gene, herein designated VGAM HOST TARGET GENE, is a human gene contained in the human genome.

[4464] VGAM322 gene, herein designated VGAM GENE, encodes a VGAM322 precursor RNA, herein designated VGAM PRECURSOR RNA. Similar to other miRNA genes, and unlike most ordinary genes, VGAM322 precursor RNA, herein designated VGAM PRECURSOR RNA, does not encode a protein. A nucleotide sequence identical or highly similar to the nucleotide sequence of VGAM322 precursor RNA is designated SEQ ID:308, and is provided hereinbelow with reference to the sequence listing part. Nucleotide sequence SEQ ID:308 is located at position 188927 relative to the genome of Vaccinia virus.

[4465] VGAM322 precursor RNA, herein designated VGAM PRECURSOR RNA, folds onto itself, forming VGAM322 folded precursor RNA, herein designated VGAM FOLDED PRECURSOR RNA, which has a two-dimensional hairpin structure. As is well known in the art, this hairpin structure, is typical of RNA encoded by miRNA genes, and is due to the fact that the nucleotide sequence of the first half of the RNA encoded by a miRNA gene is an accurate or partial inversed-reversed sequence of the nucleotide sequence of the second half thereof.

[4466] An enzyme complex designated DICER COMPLEX, dices the VGAM322 folded precursor RNA, herein designated VGAM FOLDED PRECURSOR RNA, into VGAM322 RNA, herein designated VGAM RNA, a single stranded ˜22 nt long RNA segment. As is known in the art, dicing of a hairpin structured RNA precursor product into a short ˜22 nt RNA segment is catalyzed by an enzyme complex comprising an enzyme called Dicer together with other necessary proteins. A probable (over 84%) nucleotide sequence of VGAM322 RNA is designated SEQ ID:657, and is provided hereinbelow with reference to the sequence listing part.

[4467] VGAM322 host target gene, herein designated VGAM HOST TARGET GENE, encodes a corresponding messenger RNA, VGAM322 host target RNA, herein designated VGAM HOST TARGET RNA. VGAM322 host target RNA, herein designated VGAM HOST TARGET RNA, comprises three regions, as is typical of mRNA of a protein coding gene: a 5 untranslated region, a protein coding region and a 3 untranslated region, designated 5UTR, PROTEIN CODING and 3UTR respectively.

[4468] VGAM322 RNA, herein designated VGAM RNA, binds complementarily to one or more host target binding sites located in untranslated regions of VGAM322 host target RNA, herein designated VGAM HOST TARGET RNA. This complementary binding is due to the fact that the nucleotide sequence of VGAM322 RNA, herein designated VGAM RNA, is an accurate or a partial inversed-reversed sequence of the nucleotide sequence of each of the host target binding sites. As an illustration, FIG. 1 shows 3 such host target binding sites, designated BINDING SITE I, BINDING SITE II and BINDING SITE III respectively. It is appreciated that the number of host target binding sites shown in FIG. 1 is meant as an illustration only, and is not meant to be limiting VGAM322 RNA, herein designated VGAM RNA, may have a different number of host target binding sites in untranslated regions of a VGAM322 host target RNA, herein designated VGAM HOST TARGET RNA. It is further appreciated that while FIG. 1 depicts host target binding sites in the 3UTR region, this is meant as an example only these host target binding sites may be located in the 3UTR region, the 5UTR region, or in both 3UTR and 5UTR regions.

[4469] The complementary binding of VGAM322 RNA, herein designated VGAM RNA, to host target binding sites on VGAM322 host target RNA, herein designated VGAM HOST TARGET RNA, such as BINDING SITE I, BINDING SITE II and BINDING SITE III, inhibits translation of VGAM322 host target RNA, herein designated VGAM HOST TARGET RNA, into VGAM322 host target protein, herein designated VGAM HOST TARGET PROTEIN. VGAM host target protein is therefore outlined by a broken line.

[4470] It is appreciated that VGAM322 host target gene, herein designated VGAM HOST TARGET GENE, in fact represents a plurality of VGAM322 host target genes. The mRNA of each one of this plurality of VGAM322 host target genes comprises one or more host target binding sites, each having a nucleotide sequence which is at least partly complementary to VGAM322 RNA, herein designated VGAM RNA, and which when bound by VGAM322 RNA, herein designated VGAM RNA, causes inhibition of translation of respective one or more VGAM322 host target proteins.

[4471] It is further appreciated by one skilled in the art that the mode of translational inhibition illustrated by FIG. 1 with specific reference to translational inhibition exerted by VGAM322 gene, herein designated VGAM GENE, on one or more VGAM322 host target gene, herein designated VGAM HOST TARGET GENE, is in fact common to other known non-viral miRNA genes. As mentioned hereinabove with reference to the background section, although a specific complementary binding site has been demonstrated only for some of the known miRNA genes (primarily Lin-4 and Let-7), all other recently discovered miRNA genes are also believed by those skilled in the art to modulate expression of other genes by complementary binding, although specific complementary binding sites of these other miRNA genes have not yet been found (Ruvkun G., Perspective: Glimpses of a tiny RNA world, Science 294, 779 (2001)).

[4472] It is yet further appreciated that a function of VGAM322 is inhibition of expression of host target genes, as part of a novel viral mechanism of attacking a host. Accordingly, utilities of VGAM322 include diagnosis, prevention and treatment of viral infection by Vaccinia virus. Specific functions, and accordingly utilities, of VGAM322 correlate with, and may be deduced from, the identity of the host target genes which VGAM322 binds and inhibits, and the function of these host target genes, as elaborated hereinbelow.

[4473] Nucleotide sequences of the VGAM322 precursor RNA, herein designated VGAM PRECURSOR RNA, and of the diced VGAM322 RNA, herein designated VGAM RNA, and a schematic representation of the secondary folding of VGAM322 folded precursor RNA, herein designated VGAM FOLDED PRECURSOR RNA, of VGAM322 are further described hereinbelow with reference to Table 1.

[4474] Nucleotide sequences of host target binding sites, such as BINDING SITE-I, BINDING SITE-II and BINDING SITE-III of FIG. 1, found on, and schematic representation of the complementarity of each of these host target binding sites to VGAM322 RNA, herein designated VGAM RNA, are described hereinbelow with reference to Table 2.

[4475] FIG. 1 further provides a conceptual description of another novel bioinformatically detected viral gene of the present invention, referred to here as Viral Genomic Address Messenger 323 (VGAM323) viral gene, which modulates expression of respective host target genes thereof, the function and utility of which host target genes is known in the art.

[4476] VGAM323 is a novel bioinformatically detected regulatory, non protein coding, viral micro RNA (miRNA) gene. The method by which VGAM323 was detected is described hereinabove with reference to FIGS. 2-8.

[4477] VGAM323 gene, herein designated VGAM GENE, is a viral gene contained in the genome of Vaccinia virus. VGAM323 host target gene, herein designated VGAM HOST TARGET GENE, is a human gene contained in the human genome.

[4478] VGAM323 gene, herein designated VGAM GENE, encodes a VGAM323 precursor RNA, herein designated VGAM PRECURSOR RNA. Similar to other miRNA genes, and unlike most ordinary genes, VGAM323 precursor RNA, herein designated VGAM PRECURSOR RNA, does not encode a protein. A nucleotide sequence identical or highly similar to the nucleotide sequence of VGAM323 precursor RNA is designated SEQ ID:309, and is provided hereinbelow with reference to the sequence listing part. Nucleotide sequence SEQ ID:309 is located at position 188927 relative to the genome of Vaccinia virus.

[4479] VGAM323 precursor RNA, herein designated VGAM PRECURSOR RNA, folds onto itself, forming VGAM323 folded precursor RNA, herein designated VGAM FOLDED PRECURSOR RNA, which has a two-dimensional hairpin structure. As is well known in the art, this hairpin structure, is typical of RNA encoded by miRNA genes, and is due to the fact that the nucleotide sequence of the first half of the RNA encoded by a miRNA gene is an accurate or partial inversed-reversed sequence of the nucleotide sequence of the second half thereof.

[4480] An enzyme complex designated DICER COMPLEX, dices the VGAM323 folded precursor RNA, herein designated VGAM FOLDED PRECURSOR RNA, into VGAM323 RNA, herein designated VGAM RNA, a single stranded ˜22 nt long RNA segment. As is known in the art, dicing of a hairpin structured RNA precursor product into a short ˜22 nt RNA segment is catalyzed by an enzyme complex comprising an enzyme called Dicer together with other necessary proteins. A probable (over 84%) nucleotide sequence of VGAM323 RNA is designated SEQ ID:658, and is provided hereinbelow with reference to the sequence listing part.

[4481] VGAM323 host target gene, herein designated VGAM HOST TARGET GENE, encodes a corresponding messenger RNA, VGAM323 host target RNA, herein designated VGAM HOST TARGET RNA. VGAM323 host target RNA, herein designated VGAM HOST TARGET RNA, comprises three regions, as is typical of mRNA of a protein coding gene: a 5 untranslated region, a protein coding region and a 3 untranslated region, designated 5UTR, PROTEIN CODING and 3UTR respectively.

[4482] VGAM323 RNA, herein designated VGAM RNA, binds complementarily to one or more host target binding sites located in untranslated regions of VGAM323 host target RNA, herein designated VGAM HOST TARGET RNA. This complementary binding is due to the fact that the nucleotide sequence of VGAM323 RNA, herein designated VGAM RNA, is an accurate or a partial inversed-reversed sequence of the nucleotide sequence of each of the host target binding sites. As an illustration, FIG. 1 shows 3 such host target binding sites, designated BINDING SITE I, BINDING SITE II and BINDING SITE III respectively. It is appreciated that the number of host target binding sites shown in FIG. 1 is meant as an illustration only, and is not meant to be limiting VGAM323 RNA, herein designated VGAM RNA, may have a different number of host target binding sites in untranslated regions of a VGAM323 host target RNA, herein designated VGAM HOST TARGET RNA. It is further appreciated that while FIG. 1 depicts host target binding sites in the 3UTR region, this is meant as an example only these host target binding sites may be located in the 3UTR region, the 5UTR region, or in both 3UTR and 5UTR regions.

[4483] The complementary binding of VGAM323 RNA, herein designated VGAM RNA, to host target binding sites on VGAM323 host target RNA, herein designated VGAM HOST TARGET RNA, such as BINDING SITE I, BINDING SITE II and BINDING SITE III, inhibits translation of VGAM323 host target RNA, herein designated VGAM HOST TARGET RNA, into VGAM323 host target protein, herein designated VGAM HOST TARGET PROTEIN. VGAM host target protein is therefore outlined by a broken line.

[4484] It is appreciated that VGAM323 host target gene, herein designated VGAM HOST TARGET GENE, in fact represents a plurality of VGAM323 host target genes. The mRNA of each one of this plurality of VGAM323 host target genes comprises one or more host target binding sites, each having a nucleotide sequence which is at least partly complementary to VGAM323 RNA, herein designated VGAM RNA, and which when bound by VGAM323 RNA, herein designated VGAM RNA, causes inhibition of translation of respective one or more VGAM323 host target proteins.

[4485] It is further appreciated by one skilled in the art that the mode of translational inhibition illustrated by FIG. 1 with specific reference to translational inhibition exerted by VGAM323 gene, herein designated VGAM GENE, on one or more VGAM323 host target gene, herein designated VGAM HOST TARGET GENE, is in fact common to other known non-viral miRNA genes. As mentioned hereinabove with reference to the background section, although a specific complementary binding site has been demonstrated only for some of the known miRNA genes (primarily Lin-4 and Let-7), all other recently discovered miRNA genes are also believed by those skilled in the art to modulate expression of other genes by complementary binding, although specific complementary binding sites of these other miRNA genes have not yet been found (Ruvkun G., Perspective: Glimpses of a tiny RNA world, Science 294, 779 (2001)).

[4486] It is yet further appreciated that a function of VGAM323 is inhibition of expression of host target genes, as part of a novel viral mechanism of attacking a host. Accordingly, utilities of VGAM323 include diagnosis, prevention and treatment of viral infection by Vaccinia virus. Specific functions, and accordingly utilities, of VGAM323 correlate with, and may be deduced from, the identity of the host target genes which VGAM323 binds and inhibits, and the function of these host target genes, as elaborated hereinbelow.

[4487] Nucleotide sequences of the VGAM323 precursor RNA, herein designated VGAM PRECURSOR RNA, and of the diced VGAM323 RNA, herein designated VGAM RNA, and a schematic representation of the secondary folding of VGAM323 folded precursor RNA, herein designated VGAM FOLDED PRECURSOR RNA, of VGAM323 are further described hereinbelow with reference to Table 1.

[4488] Nucleotide sequences of host target binding sites, such as BINDING SITE-I, BINDING SITE-II and BINDING SITE-III of FIG. 1, found on, and schematic representation of the complementarity of each of these host target binding sites to VGAM323 RNA, herein designated VGAM RNA, are described hereinbelow with reference to Table 2.

[4489] FIG. 1 further provides a conceptual description of another novel bioinformatically detected viral gene of the present invention, referred to here as Viral Genomic Address Messenger 324 (VGAM324) viral gene, which modulates expression of respective host target genes thereof, the function and utility of which host target genes is known in the art.

[4490] VGAM324 is a novel bioinformatically detected regulatory, non protein coding, viral micro RNA (miRNA) gene. The method by which VGAM324 was detected is described hereinabove with reference to FIGS. 2-8.

[4491] VGAM324 gene, herein designated VGAM GENE, is a viral gene contained in the genome of Vaccinia virus. VGAM324 host target gene, herein designated VGAM HOST TARGET GENE, is a human gene contained in the human genome.

[4492] VGAM324 gene, herein designated VGAM GENE, encodes a VGAM324 precursor RNA, herein designated VGAM PRECURSOR RNA. Similar to other miRNA genes, and unlike most ordinary genes, VGAM324 precursor RNA, herein designated VGAM PRECURSOR RNA, does not encode a protein. A nucleotide sequence identical or highly similar to the nucleotide sequence of VGAM324 precursor RNA is designated SEQ ID:310, and is provided hereinbelow with reference to the sequence listing part. Nucleotide sequence SEQ ID:310 is located at position 188927 relative to the genome of Vaccinia virus.

[4493] VGAM324 precursor RNA, herein designated VGAM PRECURSOR RNA, folds onto itself, forming VGAM324 folded precursor RNA, herein designated VGAM FOLDED PRECURSOR RNA, which has a two-dimensional hairpin structure. As is well known in the art, this hairpin structure, is typical of RNA encoded by miRNA genes, and is due to the fact that the nucleotide sequence of the first half of the RNA encoded by a miRNA gene is an accurate or partial inversed-reversed sequence of the nucleotide sequence of the second half thereof.

[4494] An enzyme complex designated DICER COMPLEX, dices the VGAM324 folded precursor RNA, herein designated VGAM FOLDED PRECURSOR RNA, into VGAM324 RNA, herein designated VGAM RNA, a single stranded ˜22 nt long RNA segment. As is known in the art, dicing of a hairpin structured RNA precursor product into a short ˜22 nt RNA segment is catalyzed by an enzyme complex comprising an enzyme called Dicer together with other necessary proteins. A probable (over 84%) nucleotide sequence of VGAM324 RNA is designated SEQ ID:659, and is provided hereinbelow with reference to the sequence listing part.

[4495] VGAM324 host target gene, herein designated VGAM HOST TARGET GENE, encodes a corresponding messenger RNA, VGAM324 host target RNA, herein designated VGAM HOST TARGET RNA. VGAM324 host target RNA, herein designated VGAM HOST TARGET RNA, comprises three regions, as is typical of mRNA of a protein coding gene: a 5 untranslated region, a protein coding region and a 3 untranslated region, designated 5UTR, PROTEIN CODING and 3UTR respectively.

[4496] VGAM324 RNA, herein designated VGAM RNA, binds complementarily to one or more host target binding sites located in untranslated regions of VGAM324 host target RNA, herein designated VGAM HOST TARGET RNA. This complementary binding is due to the fact that the nucleotide sequence of VGAM324 RNA, herein designated VGAM RNA, is an accurate or a partial inversed-reversed sequence of the nucleotide sequence of each of the host target binding sites. As an illustration, FIG. 1 shows 3 such host target binding sites, designated BINDING SITE I, BINDING SITE II and BINDING SITE III respectively. It is appreciated that the number of host target binding sites shown in FIG. 1 is meant as an illustration only, and is not meant to be limiting VGAM324 RNA, herein designated VGAM RNA, may have a different number of host target binding sites in untranslated regions of a VGAM324 host target RNA, herein designated VGAM HOST TARGET RNA. It is further appreciated that while FIG. 1 depicts host target binding sites in the 3UTR region, this is meant as an example only these host target binding sites may be located in the 3UTR region, the 5UTR region, or in both 3UTR and 5UTR regions.

[4497] The complementary binding of VGAM324 RNA, herein designated VGAM RNA, to host target binding sites on VGAM324 host target RNA, herein designated VGAM HOST TARGET RNA, such as BINDING SITE I, BINDING SITE II and BINDING SITE III, inhibits translation of VGAM324 host target RNA, herein designated VGAM HOST TARGET RNA, into VGAM324 host target protein, herein designated VGAM HOST TARGET PROTEIN. VGAM host target protein is therefore outlined by a broken line.

[4498] It is appreciated that VGAM324 host target gene, herein designated VGAM HOST TARGET GENE, in fact represents a plurality of VGAM324 host target genes. The mRNA of each one of this plurality of VGAM324 host target genes comprises one or more host target binding sites, each having a nucleotide sequence which is at least partly complementary to VGAM324 RNA, herein designated VGAM RNA, and which when bound by VGAM324 RNA, herein designated VGAM RNA, causes inhibition of translation of respective one or more VGAM324 host target proteins.

[4499] It is further appreciated by one skilled in the art that the mode of translational inhibition illustrated by FIG. 1 with specific reference to translational inhibition exerted by VGAM324 gene, herein designated VGAM GENE, on one or more VGAM324 host target gene, herein designated VGAM HOST TARGET GENE, is in fact common to other known non-viral miRNA genes. As mentioned hereinabove with reference to the background section, although a specific complementary binding site has been demonstrated only for some of the known miRNA genes (primarily Lin-4 and Let-7), all other recently discovered miRNA genes are also believed by those skilled in the art to modulate expression of other genes by complementary binding, although specific complementary binding sites of these other miRNA genes have not yet been found (Ruvkun G., Perspective: Glimpses of a tiny RNA world, Science 294, 779 (2001)).

[4500] It is yet further appreciated that a function of VGAM324 is inhibition of expression of host target genes, as part of a novel viral mechanism of attacking a host. Accordingly, utilities of VGAM324 include diagnosis, prevention and treatment of viral infection by Vaccinia virus. Specific functions, and accordingly utilities, of VGAM324 correlate with, and may be deduced from, the identity of the host target genes which VGAM324 binds and inhibits, and the function of these host target genes, as elaborated hereinbelow.

[4501] Nucleotide sequences of the VGAM324 precursor RNA, herein designated VGAM PRECURSOR RNA, and of the diced VGAM324 RNA, herein designated VGAM RNA, and a schematic representation of the secondary folding of VGAM324 folded precursor RNA, herein designated VGAM FOLDED PRECURSOR RNA, of VGAM324 are further described hereinbelow with reference to Table 1.

[4502] Nucleotide sequences of host target binding sites, such as BINDING SITE-I, BINDING SITE-II and BINDING SITE-III of FIG. 1, found on, and schematic representation of the complementarity of each of these host target binding sites to VGAM324 RNA, herein designated VGAM RNA, are described hereinbelow with reference to Table 2.

[4503] FIG. 1 further provides a conceptual description of another novel bioinformatically detected viral gene of the present invention, referred to here as Viral Genomic Address Messenger 325 (VGAM325) viral gene, which modulates expression of respective host target genes thereof, the function and utility of which host target genes is known in the art.

[4504] VGAM325 is a novel bioinformatically detected regulatory, non protein coding, viral micro RNA (miRNA) gene. The method by which VGAM325 was detected is described hereinabove with reference to FIGS. 2-8.

[4505] VGAM325 gene, herein designated VGAM GENE, is a viral gene contained in the genome of Vaccinia virus. VGAM325 host target gene, herein designated VGAM HOST TARGET GENE, is a human gene contained in the human genome.

[4506] VGAM325 gene, herein designated VGAM GENE, encodes a VGAM325 precursor RNA, herein designated VGAM PRECURSOR RNA. Similar to other miRNA genes, and unlike most ordinary genes, VGAM325 precursor RNA, herein designated VGAM PRECURSOR RNA, does not encode a protein. A nucleotide sequence identical or highly similar to the nucleotide sequence of VGAM325 precursor RNA is designated SEQ ID:311, and is provided hereinbelow with reference to the sequence listing part. Nucleotide sequence SEQ ID:311 is located at position 188927 relative to the genome of Vaccinia virus.

[4507] VGAM325 precursor RNA, herein designated VGAM PRECURSOR RNA, folds onto itself, forming VGAM325 folded precursor RNA, herein designated VGAM FOLDED PRECURSOR RNA, which has a two-dimensional hairpin structure. As is well known in the art, this hairpin structure, is typical of RNA encoded by miRNA genes, and is due to the fact that the nucleotide sequence of the first half of the RNA encoded by a miRNA gene is an accurate or partial inversed-reversed sequence of the nucleotide sequence of the second half thereof.

[4508] An enzyme complex designated DICER COMPLEX, dices the VGAM325 folded precursor RNA, herein designated VGAM FOLDED PRECURSOR RNA, into VGAM325 RNA, herein designated VGAM RNA, a single stranded ˜22 nt long RNA segment. As is known in the art, dicing of a hairpin structured RNA precursor product into a short ˜22 nt RNA segment is catalyzed by an enzyme complex comprising an enzyme called Dicer together with other necessary proteins. A probable (over 84%) nucleotide sequence of VGAM325 RNA is designated SEQ ID:660, and is provided hereinbelow with reference to the sequence listing part.

[4509] VGAM325 host target gene, herein designated VGAM HOST TARGET GENE, encodes a corresponding messenger RNA, VGAM325 host target RNA, herein designated VGAM HOST TARGET RNA. VGAM325 host target RNA, herein designated VGAM HOST TARGET RNA, comprises three regions, as is typical of mRNA of a protein coding gene: a 5 untranslated region, a protein coding region and a 3 untranslated region, designated 5UTR, PROTEIN CODING and 3UTR respectively.

[4510] VGAM325 RNA, herein designated VGAM RNA, binds complementarily to one or more host target binding sites located in untranslated regions of VGAM325 host target RNA, herein designated VGAM HOST TARGET RNA. This complementary binding is due to the fact that the nucleotide sequence of VGAM325 RNA, herein designated VGAM RNA, is an accurate or a partial inversed-reversed sequence of the nucleotide sequence of each of the host target binding sites. As an illustration, FIG. 1 shows 3 such host target binding sites, designated BINDING SITE I, BINDING SITE II and BINDING SITE III respectively. It is appreciated that the number of host target binding sites shown in FIG. 1 is meant as an illustration only, and is not meant to be limiting VGAM325 RNA, herein designated VGAM RNA, may have a different number of host target binding sites in untranslated regions of a VGAM325 host target RNA, herein designated VGAM HOST TARGET RNA. It is further appreciated that while FIG. 1 depicts host target binding sites in the 3UTR region, this is meant as an example only these host target binding sites may be located in the 3UTR region, the 5UTR region, or in both 3UTR and 5UTR regions.

[4511] The complementary binding of VGAM325 RNA, herein designated VGAM RNA, to host target binding sites on VGAM325 host target RNA, herein designated VGAM HOST TARGET RNA, such as BINDING SITE I, BINDING SITE II and BINDING SITE III, inhibits translation of VGAM325 host target RNA, herein designated VGAM HOST TARGET RNA, into VGAM325 host target protein, herein designated VGAM HOST TARGET PROTEIN. VGAM host target protein is therefore outlined by a broken line.

[4512] It is appreciated that VGAM325 host target gene, herein designated VGAM HOST TARGET GENE, in fact represents a plurality of VGAM325 host target genes. The mRNA of each one of this plurality of VGAM325 host target genes comprises one or more host target binding sites, each having a nucleotide sequence which is at least partly complementary to VGAM325 RNA, herein designated VGAM RNA, and which when bound by VGAM325 RNA, herein designated VGAM RNA, causes inhibition of translation of respective one or more VGAM325 host target proteins.

[4513] It is further appreciated by one skilled in the art that the mode of translational inhibition illustrated by FIG. 1 with specific reference to translational inhibition exerted by VGAM325 gene, herein designated VGAM GENE, on one or more VGAM325 host target gene, herein designated VGAM HOST TARGET GENE, is in fact common to other known non-viral miRNA genes. As mentioned hereinabove with reference to the background section, although a specific complementary binding site has been demonstrated only for some of the known miRNA genes (primarily Lin-4 and Let-7), all other recently discovered miRNA genes are also believed by those skilled in the art to modulate expression of other genes by complementary binding, although specific complementary binding sites of these other miRNA genes have not yet been found (Ruvkun G., Perspective: Glimpses of a tiny RNA world, Science 294, 779 (2001)).

[4514] It is yet further appreciated that a function of VGAM325 is inhibition of expression of host target genes, as part of a novel viral mechanism of attacking a host. Accordingly, utilities of VGAM325 include diagnosis, prevention and treatment of viral infection by Vaccinia virus. Specific functions, and accordingly utilities, of VGAM325 correlate with, and may be deduced from, the identity of the host target genes which VGAM325 binds and inhibits, and the function of these host target genes, as elaborated hereinbelow.

[4515] Nucleotide sequences of the VGAM325 precursor RNA, herein designated VGAM PRECURSOR RNA, and of the diced VGAM325 RNA, herein designated VGAM RNA, and a schematic representation of the secondary folding of VGAM325 folded precursor RNA, herein designated VGAM FOLDED PRECURSOR RNA, of VGAM325 are further described hereinbelow with reference to Table 1.

[4516] Nucleotide sequences of host target binding sites, such as BINDING SITE-I, BINDING SITE-II and BINDING SITE-III of FIG. 1, found on, and schematic representation of the complementarity of each of these host target binding sites to VGAM325 RNA, herein designated VGAM RNA, are described hereinbelow with reference to Table 2.

[4517] FIG. 1 further provides a conceptual description of another novel bioinformatically detected viral gene of the present invention, referred to here as Viral Genomic Address Messenger 326 (VGAM326) viral gene, which modulates expression of respective host target genes thereof, the function and utility of which host target genes is known in the art.

[4518] VGAM326 is a novel bioinformatically detected regulatory, non protein coding, viral micro RNA (miRNA) gene. The method by which VGAM326 was detected is described hereinabove with reference to FIGS. 2-8.

[4519] VGAM326 gene, herein designated VGAM GENE, is a viral gene contained in the genome of Vaccinia virus. VGAM326 host target gene, herein designated VGAM HOST TARGET GENE, is a human gene contained in the human genome.

[4520] VGAM326 gene, herein designated VGAM GENE, encodes a VGAM326 precursor RNA, herein designated VGAM PRECURSOR RNA. Similar to other miRNA genes, and unlike most ordinary genes, VGAM326 precursor RNA, herein designated VGAM PRECURSOR RNA, does not encode a protein. A nucleotide sequence identical or highly similar to the nucleotide sequence of VGAM326 precursor RNA is designated SEQ ID:312, and is provided hereinbelow with reference to the sequence listing part. Nucleotide sequence SEQ ID:312 is located at position 188927 relative to the genome of Vaccinia virus.

[4521] VGAM326 precursor RNA, herein designated VGAM PRECURSOR RNA, folds onto itself, forming VGAM326 folded precursor RNA, herein designated VGAM FOLDED PRECURSOR RNA, which has a two-dimensional hairpin structure. As is well known in the art, this hairpin structure, is typical of RNA encoded by miRNA genes, and is due to the fact that the nucleotide sequence of the first half of the RNA encoded by a miRNA gene is an accurate or partial inversed-reversed sequence of the nucleotide sequence of the second half thereof.

[4522] An enzyme complex designated DICER COMPLEX, dices the VGAM326 folded precursor RNA, herein designated VGAM FOLDED PRECURSOR RNA, into VGAM326 RNA, herein designated VGAM RNA, a single stranded ˜22 nt long RNA segment. As is known in the art, dicing of a hairpin structured RNA precursor product into a short ˜22 nt RNA segment is catalyzed by an enzyme complex comprising an enzyme called Dicer together with other necessary proteins. A probable (over 84%) nucleotide sequence of VGAM326 RNA is designated SEQ ID:661, and is provided hereinbelow with reference to the sequence listing part.

[4523] VGAM326 host target gene, herein designated VGAM HOST TARGET GENE, encodes a corresponding messenger RNA, VGAM326 host target RNA, herein designated VGAM HOST TARGET RNA. VGAM326 host target RNA, herein designated VGAM HOST TARGET RNA, comprises three regions, as is typical of mRNA of a protein coding gene: a 5 untranslated region, a protein coding region and a 3 untranslated region, designated 5UTR, PROTEIN CODING and 3UTR respectively.

[4524] VGAM326 RNA, herein designated VGAM RNA, binds complementarily to one or more host target binding sites located in untranslated regions of VGAM326 host target RNA, herein designated VGAM HOST TARGET RNA. This complementary binding is due to the fact that the nucleotide sequence of VGAM326 RNA, herein designated VGAM RNA, is an accurate or a partial inversed-reversed sequence of the nucleotide sequence of each of the host target binding sites. As an illustration, FIG. 1 shows 3 such host target binding sites, designated BINDING SITE I, BINDING SITE II and BINDING SITE III respectively. It is appreciated that the number of host target binding sites shown in FIG. 1 is meant as an illustration only, and is not meant to be limiting VGAM326 RNA, herein designated VGAM RNA, may have a different number of host target binding sites in untranslated regions of a VGAM326 host target RNA, herein designated VGAM HOST TARGET RNA. It is further appreciated that while FIG. 1 depicts host target binding sites in the 3UTR region, this is meant as an example only these host target binding sites may be located in the 3UTR region, the 5UTR region, or in both 3UTR and 5UTR regions.

[4525] The complementary binding of VGAM326 RNA, herein designated VGAM RNA, to host target binding sites on VGAM326 host target RNA, herein designated VGAM HOST TARGET RNA, such as BINDING SITE I, BINDING SITE II and BINDING SITE III, inhibits translation of VGAM326 host target RNA, herein designated VGAM HOST TARGET RNA, into VGAM326 host target protein, herein designated VGAM HOST TARGET PROTEIN. VGAM host target protein is therefore outlined by a broken line.

[4526] It is appreciated that VGAM326 host target gene, herein designated VGAM HOST TARGET GENE, in fact represents a plurality of VGAM326 host target genes. The mRNA of each one of this plurality of VGAM326 host target genes comprises one or more host target binding sites, each having a nucleotide sequence which is at least partly complementary to VGAM326 RNA, herein designated VGAM RNA, and which when bound by VGAM326 RNA, herein designated VGAM RNA, causes inhibition of translation of respective one or more VGAM326 host target proteins.

[4527] It is further appreciated by one skilled in the art that the mode of translational inhibition illustrated by FIG. 1 with specific reference to translational inhibition exerted by VGAM326 gene, herein designated VGAM GENE, on one or more VGAM326 host target gene, herein designated VGAM HOST TARGET GENE, is in fact common to other known non-viral miRNA genes. As mentioned hereinabove with reference to the background section, although a specific complementary binding site has been demonstrated only for some of the known miRNA genes (primarily Lin-4 and Let-7), all other recently discovered miRNA genes are also believed by those skilled in the art to modulate expression of other genes by complementary binding, although specific complementary binding sites of these other miRNA genes have not yet been found (Ruvkun G., Perspective: Glimpses of a tiny RNA world, Science 294, 779 (2001)).

[4528] It is yet further appreciated that a function of VGAM326 is inhibition of expression of host target genes, as part of a novel viral mechanism of attacking a host. Accordingly, utilities of VGAM326 include diagnosis, prevention and treatment of viral infection by Vaccinia virus. Specific functions, and accordingly utilities, of VGAM326 correlate with, and may be deduced from, the identity of the host target genes which VGAM326 binds and inhibits, and the function of these host target genes, as elaborated hereinbelow.

[4529] Nucleotide sequences of the VGAM326 precursor RNA, herein designated VGAM PRECURSOR RNA, and of the diced VGAM326 RNA, herein designated VGAM RNA, and a schematic representation of the secondary folding of VGAM326 folded precursor RNA, herein designated VGAM FOLDED PRECURSOR RNA, of VGAM326 are further described hereinbelow with reference to Table 1.

[4530] Nucleotide sequences of host target binding sites, such as BINDING SITE-I, BINDING SITE-II and BINDING SITE-III of FIG. 1, found on, and schematic representation of the complementarity of each of these host target binding sites to VGAM326 RNA, herein designated VGAM RNA, are described hereinbelow with reference to Table 2.

[4531] FIG. 1 further provides a conceptual description of another novel bioinformatically detected viral gene of the present invention, referred to here as Viral Genomic Address Messenger 327 (VGAM327) viral gene, which modulates expression of respective host target genes thereof, the function and utility of which host target genes is known in the art.

[4532] VGAM327 is a novel bioinformatically detected regulatory, non protein coding, viral micro RNA (miRNA) gene. The method by which VGAM327 was detected is described hereinabove with reference to FIGS. 2-8.

[4533] VGAM327 gene, herein designated VGAM GENE, is a viral gene contained in the genome of Vaccinia virus. VGAM327 host target gene, herein designated VGAM HOST TARGET GENE, is a human gene contained in the human genome.

[4534] VGAM327 gene, herein designated VGAM GENE, encodes a VGAM327 precursor RNA, herein designated VGAM PRECURSOR RNA. Similar to other miRNA genes, and unlike most ordinary genes, VGAM327 precursor RNA, herein designated VGAM PRECURSOR RNA, does not encode a protein. A nucleotide sequence identical or highly similar to the nucleotide sequence of VGAM327 precursor RNA is designated SEQ ID:313, and is provided hereinbelow with reference to the sequence listing part. Nucleotide sequence SEQ ID:313 is located at position 188927 relative to the genome of Vaccinia virus.

[4535] VGAM327 precursor RNA, herein designated VGAM PRECURSOR RNA, folds onto itself, forming VGAM327 folded precursor RNA, herein designated VGAM FOLDED PRECURSOR RNA, which has a two-dimensional hairpin structure. As is well known in the art, this hairpin structure, is typical of RNA encoded by miRNA genes, and is due to the fact that the nucleotide sequence of the first half of the RNA encoded by a miRNA gene is an accurate or partial inversed-reversed sequence of the nucleotide sequence of the second half thereof.

[4536] An enzyme complex designated DICER COMPLEX, dices the VGAM327 folded precursor RNA, herein designated VGAM FOLDED PRECURSOR RNA, into VGAM327 RNA, herein designated VGAM RNA, a single stranded ˜22 nt long RNA segment. As is known in the art, dicing of a hairpin structured RNA precursor product into a short ˜22 nt RNA segment is catalyzed by an enzyme complex comprising an enzyme called Dicer together with other necessary proteins. A probable (over 84%) nucleotide sequence of VGAM327 RNA is designated SEQ ID:662, and is provided hereinbelow with reference to the sequence listing part.

[4537] VGAM327 host target gene, herein designated VGAM HOST TARGET GENE, encodes a corresponding messenger RNA, VGAM327 host target RNA, herein designated VGAM HOST TARGET RNA. VGAM327 host target RNA, herein designated VGAM HOST TARGET RNA, comprises three regions, as is typical of mRNA of a protein coding gene: a 5 untranslated region, a protein coding region and a 3 untranslated region, designated 5UTR, PROTEIN CODING and 3UTR respectively.

[4538] VGAM327 RNA, herein designated VGAM RNA, binds complementarily to one or more host target binding sites located in untranslated regions of VGAM327 host target RNA, herein designated VGAM HOST TARGET RNA. This complementary binding is due to the fact that the nucleotide sequence of VGAM327 RNA, herein designated VGAM RNA, is an accurate or a partial inversed-reversed sequence of the nucleotide sequence of each of the host target binding sites. As an illustration, FIG. 1 shows 3 such host target binding sites, designated BINDING SITE I, BINDING SITE II and BINDING SITE III respectively. It is appreciated that the number of host target binding sites shown in FIG. 1 is meant as an illustration only, and is not meant to be limiting VGAM327 RNA, herein designated VGAM RNA, may have a different number of host target binding sites in untranslated regions of a VGAM327 host target RNA, herein designated VGAM HOST TARGET RNA. It is further appreciated that while FIG. 1 depicts host target binding sites in the 3UTR region, this is meant as an example only these host target binding sites may be located in the 3UTR region, the 5UTR region, or in both 3UTR and 5UTR regions.

[4539] The complementary binding of VGAM327 RNA, herein designated VGAM RNA, to host target binding sites on VGAM327 host target RNA, herein designated VGAM HOST TARGET RNA, such as BINDING SITE I, BINDING SITE II and BINDING SITE III, inhibits translation of VGAM327 host target RNA, herein designated VGAM HOST TARGET RNA, into VGAM327 host target protein, herein designated VGAM HOST TARGET PROTEIN. VGAM host target protein is therefore outlined by a broken line.

[4540] It is appreciated that VGAM327 host target gene, herein designated VGAM HOST TARGET GENE, in fact represents a plurality of VGAM327 host target genes. The mRNA of each one of this plurality of VGAM327 host target genes comprises one or more host target binding sites, each having a nucleotide sequence which is at least partly complementary to VGAM327 RNA, herein designated VGAM RNA, and which when bound by VGAM327 RNA, herein designated VGAM RNA, causes inhibition of translation of respective one or more VGAM327 host target proteins.

[4541] It is further appreciated by one skilled in the art that the mode of translational inhibition illustrated by FIG. 1 with specific reference to translational inhibition exerted by VGAM327 gene, herein designated VGAM GENE, on one or more VGAM327 host target gene, herein designated VGAM HOST TARGET GENE, is in fact common to other known non-viral miRNA genes. As mentioned hereinabove with reference to the background section, although a specific complementary binding site has been demonstrated only for some of the known miRNA genes (primarily Lin-4 and Let-7), all other recently discovered miRNA genes are also believed by those skilled in the art to modulate expression of other genes by complementary binding, although specific complementary binding sites of these other miRNA genes have not yet been found (Ruvkun G., Perspective: Glimpses of a tiny RNA world, Science 294, 779 (2001)).

[4542] It is yet further appreciated that a function of VGAM327 is inhibition of expression of host target genes, as part of a novel viral mechanism of attacking a host. Accordingly, utilities of VGAM327 include diagnosis, prevention and treatment of viral infection by Vaccinia virus. Specific functions, and accordingly utilities, of VGAM327 correlate with, and may be deduced from, the identity of the host target genes which VGAM327 binds and inhibits, and the function of these host target genes, as elaborated hereinbelow.

[4543] Nucleotide sequences of the VGAM327 precursor RNA, herein designated VGAM PRECURSOR RNA, and of the diced VGAM327 RNA, herein designated VGAM RNA, and a schematic representation of the secondary folding of VGAM327 folded precursor RNA, herein designated VGAM FOLDED PRECURSOR RNA, of VGAM327 are further described hereinbelow with reference to Table 1.

[4544] Nucleotide sequences of host target binding sites, such as BINDING SITE-I, BINDING SITE-II and BINDING SITE-III of FIG. 1, found on, and schematic representation of the complementarity of each of these host target binding sites to VGAM327 RNA, herein designated VGAM RNA, are described hereinbelow with reference to Table 2.

[4545] FIG. 1 further provides a conceptual description of another novel bioinformatically detected viral gene of the present invention, referred to here as Viral Genomic Address Messenger 328 (VGAM328) viral gene, which modulates expression of respective host target genes thereof, the function and utility of which host target genes is known in the art.

[4546] VGAM328 is a novel bioinformatically detected regulatory, non protein coding, viral micro RNA (miRNA) gene. The method by which VGAM328 was detected is described hereinabove with reference to FIGS. 2-8.

[4547] VGAM328 gene, herein designated VGAM GENE, is a viral gene contained in the genome of Vaccinia virus. VGAM328 host target gene, herein designated VGAM HOST TARGET GENE, is a human gene contained in the human genome.

[4548] VGAM328 gene, herein designated VGAM GENE, encodes a VGAM328 precursor RNA, herein designated VGAM PRECURSOR RNA. Similar to other miRNA genes, and unlike most ordinary genes, VGAM328 precursor RNA, herein designated VGAM PRECURSOR RNA, does not encode a protein. A nucleotide sequence identical or highly similar to the nucleotide sequence of VGAM328 precursor RNA is designated SEQ ID:314, and is provided hereinbelow with reference to the sequence listing part. Nucleotide sequence SEQ ID:314 is located at position 188927 relative to the genome of Vaccinia virus.

[4549] VGAM328 precursor RNA, herein designated VGAM PRECURSOR RNA, folds onto itself, forming VGAM328 folded precursor RNA, herein designated VGAM FOLDED PRECURSOR RNA, which has a two-dimensional hairpin structure. As is well known in the art, this hairpin structure, is typical of RNA encoded by miRNA genes, and is due to the fact that the nucleotide sequence of the first half of the RNA encoded by a miRNA gene is an accurate or partial inversed-reversed sequence of the nucleotide sequence of the second half thereof.

[4550] An enzyme complex designated DICER COMPLEX, dices the VGAM328 folded precursor RNA, herein designated VGAM FOLDED PRECURSOR RNA, into VGAM328 RNA, herein designated VGAM RNA, a single stranded ˜22 nt long RNA segment. As is known in the art, dicing of a hairpin structured RNA precursor product into a short ˜22 nt RNA segment is catalyzed by an enzyme complex comprising an enzyme called Dicer together with other necessary proteins. A probable (over 84%) nucleotide sequence of VGAM328 RNA is designated SEQ ID:663, and is provided hereinbelow with reference to the sequence listing part.

[4551] VGAM328 host target gene, herein designated VGAM HOST TARGET GENE, encodes a corresponding messenger RNA, VGAM328 host target RNA, herein designated VGAM HOST TARGET RNA. VGAM328 host target RNA, herein designated VGAM HOST TARGET RNA, comprises three regions, as is typical of mRNA of a protein coding gene: a 5 untranslated region, a protein coding region and a 3 untranslated region, designated 5UTR, PROTEIN CODING and 3UTR respectively.

[4552] VGAM328 RNA, herein designated VGAM RNA, binds complementarily to one or more host target binding sites located in untranslated regions of VGAM328 host target RNA, herein designated VGAM HOST TARGET RNA. This complementary binding is due to the fact that the nucleotide sequence of VGAM328 RNA, herein designated VGAM RNA, is an accurate or a partial inversed-reversed sequence of the nucleotide sequence of each of the host target binding sites. As an illustration, FIG. 1 shows 3 such host target binding sites, designated BINDING SITE I, BINDING SITE II and BINDING SITE III respectively. It is appreciated that the number of host target binding sites shown in FIG. 1 is meant as an illustration only, and is not meant to be limiting VGAM328 RNA, herein designated VGAM RNA, may have a different number of host target binding sites in untranslated regions of a VGAM328 host target RNA, herein designated VGAM HOST TARGET RNA. It is further appreciated that while FIG. 1 depicts host target binding sites in the 3UTR region, this is meant as an example only these host target binding sites may be located in the 3UTR region, the 5UTR region, or in both 3UTR and 5UTR regions.

[4553] The complementary binding of VGAM328 RNA, herein designated VGAM RNA, to host target binding sites on VGAM328 host target RNA, herein designated VGAM HOST TARGET RNA, such as BINDING SITE I, BINDING SITE II and BINDING SITE III, inhibits translation of VGAM328 host target RNA, herein designated VGAM HOST TARGET RNA, into VGAM328 host target protein, herein designated VGAM HOST TARGET PROTEIN. VGAM host target protein is therefore outlined by a broken line.

[4554] It is appreciated that VGAM328 host target gene, herein designated VGAM HOST TARGET GENE, in fact represents a plurality of VGAM328 host target genes. The mRNA of each one of this plurality of VGAM328 host target genes comprises one or more host target binding sites, each having a nucleotide sequence which is at least partly complementary to VGAM328 RNA, herein designated VGAM RNA, and which when bound by VGAM328 RNA, herein designated VGAM RNA, causes inhibition of translation of respective one or more VGAM328 host target proteins.

[4555] It is further appreciated by one skilled in the art that the mode of translational inhibition illustrated by FIG. 1 with specific reference to translational inhibition exerted by VGAM328 gene, herein designated VGAM GENE, on one or more VGAM328 host target gene, herein designated VGAM HOST TARGET GENE, is in fact common to other known non-viral miRNA genes. As mentioned hereinabove with reference to the background section, although a specific complementary binding site has been demonstrated only for some of the known miRNA genes (primarily Lin-4 and Let-7), all other recently discovered miRNA genes are also believed by those skilled in the art to modulate expression of other genes by complementary binding, although specific complementary binding sites of these other miRNA genes have not yet been found (Ruvkun G., Perspective: Glimpses of a tiny RNA world, Science 294, 779 (2001)).

[4556] It is yet further appreciated that a function of VGAM328 is inhibition of expression of host target genes, as part of a novel viral mechanism of attacking a host. Accordingly, utilities of VGAM328 include diagnosis, prevention and treatment of viral infection by Vaccinia virus. Specific functions, and accordingly utilities, of VGAM328 correlate with, and may be deduced from, the identity of the host target genes which VGAM328 binds and inhibits, and the function of these host target genes, as elaborated hereinbelow.

[4557] Nucleotide sequences of the VGAM328 precursor RNA, herein designated VGAM PRECURSOR RNA, and of the diced VGAM328 RNA, herein designated VGAM RNA, and a schematic representation of the secondary folding of VGAM328 folded precursor RNA, herein designated VGAM FOLDED PRECURSOR RNA, of VGAM328 are further described hereinbelow with reference to Table 1.

[4558] Nucleotide sequences of host target binding sites, such as BINDING SITE-I, BINDING SITE-II and BINDING SITE-III of FIG. 1, found on, and schematic representation of the complementarity of each of these host target binding sites to VGAM328 RNA, herein designated VGAM RNA, are described hereinbelow with reference to Table 2.

[4559] FIG. 1 further provides a conceptual description of another novel bioinformatically detected viral gene of the present invention, referred to here as Viral Genomic Address Messenger 329 (VGAM329) viral gene, which modulates expression of respective host target genes thereof, the function and utility of which host target genes is known in the art.

[4560] VGAM329 is a novel bioinformatically detected regulatory, non protein coding, viral micro RNA (miRNA) gene. The method by which VGAM329 was detected is described hereinabove with reference to FIGS. 2-8.

[4561] VGAM329 gene, herein designated VGAM GENE, is a viral gene contained in the genome of Vaccinia virus. VGAM329 host target gene, herein designated VGAM HOST TARGET GENE, is a human gene contained in the human genome.

[4562] VGAM329 gene, herein designated VGAM GENE, encodes a VGAM329 precursor RNA, herein designated VGAM PRECURSOR RNA. Similar to other miRNA genes, and unlike most ordinary genes, VGAM329 precursor RNA, herein designated VGAM PRECURSOR RNA, does not encode a protein. A nucleotide sequence identical or highly similar to the nucleotide sequence of VGAM329 precursor RNA is designated SEQ ID:315, and is provided hereinbelow with reference to the sequence listing part. Nucleotide sequence SEQ ID:315 is located at position 188927 relative to the genome of Vaccinia virus.

[4563] VGAM329 precursor RNA, herein designated VGAM PRECURSOR RNA, folds onto itself, forming VGAM329 folded precursor RNA, herein designated VGAM FOLDED PRECURSOR RNA, which has a two-dimensional hairpin structure. As is well known in the art, this hairpin structure, is typical of RNA encoded by miRNA genes, and is due to the fact that the nucleotide sequence of the first half of the RNA encoded by a miRNA gene is an accurate or partial inversed-reversed sequence of the nucleotide sequence of the second half thereof.

[4564] An enzyme complex designated DICER COMPLEX, dices the VGAM329 folded precursor RNA, herein designated VGAM FOLDED PRECURSOR RNA, into VGAM329 RNA, herein designated VGAM RNA, a single stranded ˜22 nt long RNA segment. As is known in the art, dicing of a hairpin structured RNA precursor product into a short ˜22 nt RNA segment is catalyzed by an enzyme complex comprising an enzyme called Dicer together with other necessary proteins. A probable (over 84%) nucleotide sequence of VGAM329 RNA is designated SEQ ID:664, and is provided hereinbelow with reference to the sequence listing part.

[4565] VGAM329 host target gene, herein designated VGAM HOST TARGET GENE, encodes a corresponding messenger RNA, VGAM329 host target RNA, herein designated VGAM HOST TARGET RNA. VGAM329 host target RNA, herein designated VGAM HOST TARGET RNA, comprises three regions, as is typical of mRNA of a protein coding gene: a 5 untranslated region, a protein coding region and a 3 untranslated region, designated 5UTR, PROTEIN CODING and 3UTR respectively.

[4566] VGAM329 RNA, herein designated VGAM RNA, binds complementarily to one or more host target binding sites located in untranslated regions of VGAM329 host target RNA, herein designated VGAM HOST TARGET RNA. This complementary binding is due to the fact that the nucleotide sequence of VGAM329 RNA, herein designated VGAM RNA, is an accurate or a partial inversed-reversed sequence of the nucleotide sequence of each of the host target binding sites. As an illustration, FIG. 1 shows 3 such host target binding sites, designated BINDING SITE I, BINDING SITE II and BINDING SITE III respectively. It is appreciated that the number of host target binding sites shown in FIG. 1 is meant as an illustration only, and is not meant to be limiting VGAM329 RNA, herein designated VGAM RNA, may have a different number of host target binding sites in untranslated regions of a VGAM329 host target RNA, herein designated VGAM HOST TARGET RNA. It is further appreciated that while FIG. 1 depicts host target binding sites in the 3UTR region, this is meant as an example only these host target binding sites may be located in the 3UTR region, the 5UTR region, or in both 3UTR and 5UTR regions.

[4567] The complementary binding of VGAM329 RNA, herein designated VGAM RNA, to host target binding sites on VGAM329 host target RNA, herein designated VGAM HOST TARGET RNA, such as BINDING SITE I, BINDING SITE II and BINDING SITE III, inhibits translation of VGAM329 host target RNA, herein designated VGAM HOST TARGET RNA, into VGAM329 host target protein, herein designated VGAM HOST TARGET PROTEIN. VGAM host target protein is therefore outlined by a broken line.

[4568] It is appreciated that VGAM329 host target gene, herein designated VGAM HOST TARGET GENE, in fact represents a plurality of VGAM329 host target genes. The mRNA of each one of this plurality of VGAM329 host target genes comprises one or more host target binding sites, each having a nucleotide sequence which is at least partly complementary to VGAM329 RNA, herein designated VGAM RNA, and which when bound by VGAM329 RNA, herein designated VGAM RNA, causes inhibition of translation of respective one or more VGAM329 host target proteins.

[4569] It is further appreciated by one skilled in the art that the mode of translational inhibition illustrated by FIG. 1 with specific reference to translational inhibition exerted by VGAM329 gene, herein designated VGAM GENE, on one or more VGAM329 host target gene, herein designated VGAM HOST TARGET GENE, is in fact common to other known non-viral miRNA genes. As mentioned hereinabove with reference to the background section, although a specific complementary binding site has been demonstrated only for some of the known miRNA genes (primarily Lin-4 and Let-7), all other recently discovered miRNA genes are also believed by those skilled in the art to modulate expression of other genes by complementary binding, although specific complementary binding sites of these other miRNA genes have not yet been found (Ruvkun G., Perspective: Glimpses of a tiny RNA world, Science 294, 779 (2001)).

[4570] It is yet further appreciated that a function of VGAM329 is inhibition of expression of host target genes, as part of a novel viral mechanism of attacking a host. Accordingly, utilities of VGAM329 include diagnosis, prevention and treatment of viral infection by Vaccinia virus. Specific functions, and accordingly utilities, of VGAM329 correlate with, and may be deduced from, the identity of the host target genes which VGAM329 binds and inhibits, and the function of these host target genes, as elaborated hereinbelow.

[4571] Nucleotide sequences of the VGAM329 precursor RNA, herein designated VGAM PRECURSOR RNA, and of the diced VGAM329 RNA, herein designated VGAM RNA, and a schematic representation of the secondary folding of VGAM329 folded precursor RNA, herein designated VGAM FOLDED PRECURSOR RNA, of VGAM329 are further described hereinbelow with reference to Table 1.

[4572] Nucleotide sequences of host target binding sites, such as BINDING SITE-I, BINDING SITE-II and BINDING SITE-III of FIG. 1, found on, and schematic representation of the complementarity of each of these host target binding sites to VGAM329 RNA, herein designated VGAM RNA, are described hereinbelow with reference to Table 2.

[4573] FIG. 1 further provides a conceptual description of another novel bioinformatically detected viral gene of the present invention, referred to here as Viral Genomic Address Messenger 330 (VGAM330) viral gene, which modulates expression of respective host target genes thereof, the function and utility of which host target genes is known in the art.

[4574] VGAM330 is a novel bioinformatically detected regulatory, non protein coding, viral micro RNA (miRNA) gene. The method by which VGAM330 was detected is described hereinabove with reference to FIGS. 2-8.

[4575] VGAM330 gene, herein designated VGAM GENE, is a viral gene contained in the genome of Vaccinia virus. VGAM330 host target gene, herein designated VGAM HOST TARGET GENE, is a human gene contained in the human genome.

[4576] VGAM330 gene, herein designated VGAM GENE, encodes a VGAM330 precursor RNA, herein designated VGAM PRECURSOR RNA. Similar to other miRNA genes, and unlike most ordinary genes, VGAM330 precursor RNA, herein designated VGAM PRECURSOR RNA, does not encode a protein. A nucleotide sequence identical or highly similar to the nucleotide sequence of VGAM330 precursor RNA is designated SEQ ID:316, and is provided hereinbelow with reference to the sequence listing part. Nucleotide sequence SEQ ID:316 is located at position 188927 relative to the genome of Vaccinia virus.

[4577] VGAM330 precursor RNA, herein designated VGAM PRECURSOR RNA, folds onto itself, forming VGAM330 folded precursor RNA, herein designated VGAM FOLDED PRECURSOR RNA, which has a two-dimensional hairpin structure. As is well known in the art, this hairpin structure, is typical of RNA encoded by miRNA genes, and is due to the fact that the nucleotide sequence of the first half of the RNA encoded by a miRNA gene is an accurate or partial inversed-reversed sequence of the nucleotide sequence of the second half thereof.

[4578] An enzyme complex designated DICER COMPLEX, dices the VGAM330 folded precursor RNA, herein designated VGAM FOLDED PRECURSOR RNA, into VGAM330 RNA, herein designated VGAM RNA, a single stranded ˜22 nt long RNA segment. As is known in the art, dicing of a hairpin structured RNA precursor product into a short ˜22 nt RNA segment is catalyzed by an enzyme complex comprising an enzyme called Dicer together with other necessary proteins. A probable (over 84%) nucleotide sequence of VGAM330 RNA is designated SEQ ID:665, and is provided hereinbelow with reference to the sequence listing part.

[4579] VGAM330 host target gene, herein designated VGAM HOST TARGET GENE, encodes a corresponding messenger RNA, VGAM330 host target RNA, herein designated VGAM HOST TARGET RNA. VGAM330 host target RNA, herein designated VGAM HOST TARGET RNA, comprises three regions, as is typical of mRNA of a protein coding gene: a 5 untranslated region, a protein coding region and a 3 untranslated region, designated 5UTR, PROTEIN CODING and 3UTR respectively.

[4580] VGAM330 RNA, herein designated VGAM RNA, binds complementarily to one or more host target binding sites located in untranslated regions of VGAM330 host target RNA, herein designated VGAM HOST TARGET RNA. This complementary binding is due to the fact that the nucleotide sequence of VGAM330 RNA, herein designated VGAM RNA, is an accurate or a partial inversed-reversed sequence of the nucleotide sequence of each of the host target binding sites. As an illustration, FIG. 1 shows 3 such host target binding sites, designated BINDING SITE I, BINDING SITE II and BINDING SITE III respectively. It is appreciated that the number of host target binding sites shown in FIG. 1 is meant as an illustration only, and is not meant to be limiting VGAM330 RNA, herein designated VGAM RNA, may have a different number of host target binding sites in untranslated regions of a VGAM330 host target RNA, herein designated VGAM HOST TARGET RNA. It is further appreciated that while FIG. 1 depicts host target binding sites in the 3UTR region, this is meant as an example only these host target binding sites may be located in the 3UTR region, the 5UTR region, or in both 3UTR and 5UTR regions.

[4581] The complementary binding of VGAM330 RNA, herein designated VGAM RNA, to host target binding sites on VGAM330 host target RNA, herein designated VGAM HOST TARGET RNA, such as BINDING SITE I, BINDING SITE II and BINDING SITE III, inhibits translation of VGAM330 host target RNA, herein designated VGAM HOST TARGET RNA, into VGAM330 host target protein, herein designated VGAM HOST TARGET PROTEIN. VGAM host target protein is therefore outlined by a broken line.

[4582] It is appreciated that VGAM330 host target gene, herein designated VGAM HOST TARGET GENE, in fact represents a plurality of VGAM330 host target genes. The mRNA of each one of this plurality of VGAM330 host target genes comprises one or more host target binding sites, each having a nucleotide sequence which is at least partly complementary to VGAM330 RNA, herein designated VGAM RNA, and which when bound by VGAM330 RNA, herein designated VGAM RNA, causes inhibition of translation of respective one or more VGAM330 host target proteins.

[4583] It is further appreciated by one skilled in the art that the mode of translational inhibition illustrated by FIG. 1 with specific reference to translational inhibition exerted by VGAM330 gene, herein designated VGAM GENE, on one or more VGAM330 host target gene, herein designated VGAM HOST TARGET GENE, is in fact common to other known non-viral miRNA genes. As mentioned hereinabove with reference to the background section, although a specific complementary binding site has been demonstrated only for some of the known miRNA genes (primarily Lin-4 and Let-7), all other recently discovered miRNA genes are also believed by those skilled in the art to modulate expression of other genes by complementary binding, although specific complementary binding sites of these other miRNA genes have not yet been found (Ruvkun G., Perspective: Glimpses of a tiny RNA world, Science 294, 779 (2001)).

[4584] It is yet further appreciated that a function of VGAM330 is inhibition of expression of host target genes, as part of a novel viral mechanism of attacking a host. Accordingly, utilities of VGAM330 include diagnosis, prevention and treatment of viral infection by Vaccinia virus. Specific functions, and accordingly utilities, of VGAM330 correlate with, and may be deduced from, the identity of the host target genes which VGAM330 binds and inhibits, and the function of these host target genes, as elaborated hereinbelow.

[4585] Nucleotide sequences of the VGAM330 precursor RNA, herein designated VGAM PRECURSOR RNA, and of the diced VGAM330 RNA, herein designated VGAM RNA, and a schematic representation of the secondary folding of VGAM330 folded precursor RNA, herein designated VGAM FOLDED PRECURSOR RNA, of VGAM330 are further described hereinbelow with reference to Table 1.

[4586] Nucleotide sequences of host target binding sites, such as BINDING SITE-I, BINDING SITE-II and BINDING SITE-III of FIG. 1, found on, and schematic representation of the complementarity of each of these host target binding sites to VGAM330 RNA, herein designated VGAM RNA, are described hereinbelow with reference to Table 2.

[4587] FIG. 1 further provides a conceptual description of another novel bioinformatically detected viral gene of the present invention, referred to here as Viral Genomic Address Messenger 331 (VGAM331) viral gene, which modulates expression of respective host target genes thereof, the function and utility of which host target genes is known in the art.

[4588] VGAM331 is a novel bioinformatically detected regulatory, non protein coding, viral micro RNA (miRNA) gene. The method by which VGAM331 was detected is described hereinabove with reference to FIGS. 2-8.

[4589] VGAM331 gene, herein designated VGAM GENE, is a viral gene contained in the genome of Vaccinia virus. VGAM331 host target gene, herein designated VGAM HOST TARGET GENE, is a human gene contained in the human genome.

[4590] VGAM331 gene, herein designated VGAM GENE, encodes a VGAM331 precursor RNA, herein designated VGAM PRECURSOR RNA. Similar to other miRNA genes, and unlike most ordinary genes, VGAM331 precursor RNA, herein designated VGAM PRECURSOR RNA, does not encode a protein. A nucleotide sequence identical or highly similar to the nucleotide sequence of VGAM331 precursor RNA is designated SEQ ID:317, and is provided hereinbelow with reference to the sequence listing part. Nucleotide sequence SEQ ID:317 is located at position 189067 relative to the genome of Vaccinia virus.

[4591] VGAM331 precursor RNA, herein designated VGAM PRECURSOR RNA, folds onto itself, forming VGAM331 folded precursor RNA, herein designated VGAM FOLDED PRECURSOR RNA, which has a two-dimensional hairpin structure. As is well known in the art, this hairpin structure, is typical of RNA encoded by miRNA genes, and is due to the fact that the nucleotide sequence of the first half of the RNA encoded by a miRNA gene is an accurate or partial inversed-reversed sequence of the nucleotide sequence of the second half thereof.

[4592] An enzyme complex designated DICER COMPLEX, dices the VGAM331 folded precursor RNA, herein designated VGAM FOLDED PRECURSOR RNA, into VGAM331 RNA, herein designated VGAM RNA, a single stranded ˜22 nt long RNA segment. As is known in the art, dicing of a hairpin structured RNA precursor product into a short ˜22 nt RNA segment is catalyzed by an enzyme complex comprising an enzyme called Dicer together with other necessary proteins. A probable (over 78%) nucleotide sequence of VGAM331 RNA is designated SEQ ID:666, and is provided hereinbelow with reference to the sequence listing part.

[4593] VGAM331 host target gene, herein designated VGAM HOST TARGET GENE, encodes a corresponding messenger RNA, VGAM331 host target RNA, herein designated VGAM HOST TARGET RNA. VGAM331 host target RNA, herein designated VGAM HOST TARGET RNA, comprises three regions, as is typical of mRNA of a protein coding gene: a 5 untranslated region, a protein coding region and a 3 untranslated region, designated 5UTR, PROTEIN CODING and 3UTR respectively.

[4594] VGAM331 RNA, herein designated VGAM RNA, binds complementarily to one or more host target binding sites located in untranslated regions of VGAM331 host target RNA, herein designated VGAM HOST TARGET RNA. This complementary binding is due to the fact that the nucleotide sequence of VGAM331 RNA, herein designated VGAM RNA, is an accurate or a partial inversed-reversed sequence of the nucleotide sequence of each of the host target binding sites. As an illustration, FIG. 1 shows 3 such host target binding sites, designated BINDING SITE I, BINDING SITE II and BINDING SITE III respectively. It is appreciated that the number of host target binding sites shown in FIG. 1 is meant as an illustration only, and is not meant to be limiting VGAM331 RNA, herein designated VGAM RNA, may have a different number of host target binding sites in untranslated regions of a VGAM331 host target RNA, herein designated VGAM HOST TARGET RNA. It is further appreciated that while FIG. 1 depicts host target binding sites in the 3UTR region, this is meant as an example only these host target binding sites may be located in the 3UTR region, the 5UTR region, or in both 3UTR and 5UTR regions.

[4595] The complementary binding of VGAM331 RNA, herein designated VGAM RNA, to host target binding sites on VGAM331 host target RNA, herein designated VGAM HOST TARGET RNA, such as BINDING SITE I, BINDING SITE II and BINDING SITE III, inhibits translation of VGAM331 host target RNA, herein designated VGAM HOST TARGET RNA, into VGAM331 host target protein, herein designated VGAM HOST TARGET PROTEIN. VGAM host target protein is therefore outlined by a broken line.

[4596] It is appreciated that VGAM331 host target gene, herein designated VGAM HOST TARGET GENE, in fact represents a plurality of VGAM331 host target genes. The mRNA of each one of this plurality of VGAM331 host target genes comprises one or more host target binding sites, each having a nucleotide sequence which is at least partly complementary to VGAM331 RNA, herein designated VGAM RNA, and which when bound by VGAM331 RNA, herein designated VGAM RNA, causes inhibition of translation of respective one or more VGAM331 host target proteins.

[4597] It is further appreciated by one skilled in the art that the mode of translational inhibition illustrated by FIG. 1 with specific reference to translational inhibition exerted by VGAM331 gene, herein designated VGAM GENE, on one or more VGAM331 host target gene, herein designated VGAM HOST TARGET GENE, is in fact common to other known non-viral miRNA genes. As mentioned hereinabove with reference to the background section, although a specific complementary binding site has been demonstrated only for some of the known miRNA genes (primarily Lin-4 and Let-7), all other recently discovered miRNA genes are also believed by those skilled in the art to modulate expression of other genes by complementary binding, although specific complementary binding sites of these other miRNA genes have not yet been found (Ruvkun G., Perspective: Glimpses of a tiny RNA world, Science 294, 779 (2001)).

[4598] It is yet further appreciated that a function of VGAM331 is inhibition of expression of host target genes, as part of a novel viral mechanism of attacking a host. Accordingly, utilities of VGAM331 include diagnosis, prevention and treatment of viral infection by Vaccinia virus. Specific functions, and accordingly utilities, of VGAM331 correlate with, and may be deduced from, the identity of the host target genes which VGAM331 binds and inhibits, and the function of these host target genes, as elaborated hereinbelow.

[4599] Nucleotide sequences of the VGAM331 precursor RNA, herein designated VGAM PRECURSOR RNA, and of the diced VGAM331 RNA, herein designated VGAM RNA, and a schematic representation of the secondary folding of VGAM331 folded precursor RNA, herein designated VGAM FOLDED PRECURSOR RNA, of VGAM331 are further described hereinbelow with reference to Table 1.

[4600] Nucleotide sequences of host target binding sites, such as BINDING SITE-I, BINDING SITE-II and BINDING SITE-III of FIG. 1, found on, and schematic representation of the complementarity of each of these host target binding sites to VGAM331 RNA, herein designated VGAM RNA, are described hereinbelow with reference to Table 2.

[4601] FIG. 1 further provides a conceptual description of another novel bioinformatically detected viral gene of the present invention, referred to here as Viral Genomic Address Messenger 332 (VGAM332) viral gene, which modulates expression of respective host target genes thereof, the function and utility of which host target genes is known in the art.

[4602] VGAM332 is a novel bioinformatically detected regulatory, non protein coding, viral micro RNA (miRNA) gene. The method by which VGAM332 was detected is described hereinabove with reference to FIGS. 2-8.

[4603] VGAM332 gene, herein designated VGAM GENE, is a viral gene contained in the genome of Vaccinia virus. VGAM332 host target gene, herein designated VGAM HOST TARGET GENE, is a human gene contained in the human genome.

[4604] VGAM332 gene, herein designated VGAM GENE, encodes a VGAM332 precursor RNA, herein designated VGAM PRECURSOR RNA. Similar to other miRNA genes, and unlike most ordinary genes, VGAM332 precursor RNA, herein designated VGAM PRECURSOR RNA, does not encode a protein. A nucleotide sequence identical or highly similar to the nucleotide sequence of VGAM332 precursor RNA is designated SEQ ID:318, and is provided hereinbelow with reference to the sequence listing part. Nucleotide sequence SEQ ID:318 is located at position 11 relative to the genome of Vaccinia virus.

[4605] VGAM332 precursor RNA, herein designated VGAM PRECURSOR RNA, folds onto itself, forming VGAM332 folded precursor RNA, herein designated VGAM FOLDED PRECURSOR RNA, which has a two-dimensional hairpin structure. As is well known in the art, this hairpin structure, is typical of RNA encoded by miRNA genes, and is due to the fact that the nucleotide sequence of the first half of the RNA encoded by a miRNA gene is an accurate or partial inversed-reversed sequence of the nucleotide sequence of the second half thereof.

[4606] An enzyme complex designated DICER COMPLEX, dices the VGAM332 folded precursor RNA, herein designated VGAM FOLDED PRECURSOR RNA, into VGAM332 RNA, herein designated VGAM RNA, a single stranded ˜22 nt long RNA segment. As is known in the art, dicing of a hairpin structured RNA precursor product into a short ˜22 nt RNA segment is catalyzed by an enzyme complex comprising an enzyme called Dicer together with other necessary proteins. A probable (over 92%) nucleotide sequence of VGAM332 RNA is designated SEQ ID:667, and is provided hereinbelow with reference to the sequence listing part.

[4607] VGAM332 host target gene, herein designated VGAM HOST TARGET GENE, encodes a corresponding messenger RNA, VGAM332 host target RNA, herein designated VGAM HOST TARGET RNA. VGAM332 host target RNA, herein designated VGAM HOST TARGET RNA, comprises three regions, as is typical of mRNA of a protein coding gene: a 5 untranslated region, a protein coding region and a 3 untranslated region, designated 5UTR, PROTEIN CODING and 3UTR respectively.

[4608] VGAM332 RNA, herein designated VGAM RNA, binds complementarily to one or more host target binding sites located in untranslated regions of VGAM332 host target RNA, herein designated VGAM HOST TARGET RNA. This complementary binding is due to the fact that the nucleotide sequence of VGAM332 RNA, herein designated VGAM RNA, is an accurate or a partial inversed-reversed sequence of the nucleotide sequence of each of the host target binding sites. As an illustration, FIG. 1 shows 3 such host target binding sites, designated BINDING SITE I, BINDING SITE II and BINDING SITE III respectively. It is appreciated that the number of host target binding sites shown in FIG. 1 is meant as an illustration only, and is not meant to be limiting VGAM332 RNA, herein designated VGAM RNA, may have a different number of host target binding sites in untranslated regions of a VGAM332 host target RNA, herein designated VGAM HOST TARGET RNA. It is further appreciated that while FIG. 1 depicts host target binding sites in the 3UTR region, this is meant as an example only these host target binding sites may be located in the 3UTR region, the 5UTR region, or in both 3UTR and 5UTR regions.

[4609] The complementary binding of VGAM332 RNA, herein designated VGAM RNA, to host target binding sites on VGAM332 host target RNA, herein designated VGAM HOST TARGET RNA, such as BINDING SITE I, BINDING SITE II and BINDING SITE III, inhibits translation of VGAM332 host target RNA, herein designated VGAM HOST TARGET RNA, into VGAM332 host target protein, herein designated VGAM HOST TARGET PROTEIN. VGAM host target protein is therefore outlined by a broken line.

[4610] It is appreciated that VGAM332 host target gene, herein designated VGAM HOST TARGET GENE, in fact represents a plurality of VGAM332 host target genes. The mRNA of each one of this plurality of VGAM332 host target genes comprises one or more host target binding sites, each having a nucleotide sequence which is at least partly complementary to VGAM332 RNA, herein designated VGAM RNA, and which when bound by VGAM332 RNA, herein designated VGAM RNA, causes inhibition of translation of respective one or more VGAM332 host target proteins.

[4611] It is further appreciated by one skilled in the art that the mode of translational inhibition illustrated by FIG. 1 with specific reference to translational inhibition exerted by VGAM332 gene, herein designated VGAM GENE, on one or more VGAM332 host target gene, herein designated VGAM HOST TARGET GENE, is in fact common to other known non-viral miRNA genes. As mentioned hereinabove with reference to the background section, although a specific complementary binding site has been demonstrated only for some of the known miRNA genes (primarily Lin-4 and Let-7), all other recently discovered miRNA genes are also believed by those skilled in the art to modulate expression of other genes by complementary binding, although specific complementary binding sites of these other miRNA genes have not yet been found (Ruvkun G., Perspective: Glimpses of a tiny RNA world, Science 294, 779 (2001)).

[4612] It is yet further appreciated that a function of VGAM332 is inhibition of expression of host target genes, as part of a novel viral mechanism of attacking a host. Accordingly, utilities of VGAM332 include diagnosis, prevention and treatment of viral infection by Vaccinia virus. Specific functions, and accordingly utilities, of VGAM332 correlate with, and may be deduced from, the identity of the host target genes which VGAM332 binds and inhibits, and the function of these host target genes, as elaborated hereinbelow.

[4613] Nucleotide sequences of the VGAM332 precursor RNA, herein designated VGAM PRECURSOR RNA, and of the diced VGAM332 RNA, herein designated VGAM RNA, and a schematic representation of the secondary folding of VGAM332 folded precursor RNA, herein designated VGAM FOLDED PRECURSOR RNA, of VGAM332 are further described hereinbelow with reference to Table 1.

[4614] Nucleotide sequences of host target binding sites, such as BINDING SITE-I, BINDING SITE-II and BINDING SITE-III of FIG. 1, found on, and schematic representation of the complementarity of each of these host target binding sites to VGAM332 RNA, herein designated VGAM RNA, are described hereinbelow with reference to Table 2.

[4615] FIG. 1 further provides a conceptual description of another novel bioinformatically detected viral gene of the present invention, referred to here as Viral Genomic Address Messenger 333 (VGAM333) viral gene, which modulates expression of respective host target genes thereof, the function and utility of which host target genes is known in the art.

[4616] VGAM333 is a novel bioinformatically detected regulatory, non protein coding, viral micro RNA (miRNA) gene. The method by which VGAM333 was detected is described hereinabove with reference to FIGS. 2-8.

[4617] VGAM333 gene, herein designated VGAM GENE, is a viral gene contained in the genome of Vaccinia virus. VGAM333 host target gene, herein designated VGAM HOST TARGET GENE, is a human gene contained in the human genome.

[4618] VGAM333 gene, herein designated VGAM GENE, encodes a VGAM333 precursor RNA, herein designated VGAM PRECURSOR RNA. Similar to other miRNA genes, and unlike most ordinary genes, VGAM333 precursor RNA, herein designated VGAM PRECURSOR RNA, does not encode a protein. A nucleotide sequence identical or highly similar to the nucleotide sequence of VGAM333 precursor RNA is designated SEQ ID:319, and is provided hereinbelow with reference to the sequence listing part. Nucleotide sequence SEQ ID:319 is located at position 190758 relative to the genome of Vaccinia virus.

[4619] VGAM333 precursor RNA, herein designated VGAM PRECURSOR RNA, folds onto itself, forming VGAM333 folded precursor RNA, herein designated VGAM FOLDED PRECURSOR RNA, which has a two-dimensional hairpin structure. As is well known in the art, this hairpin structure, is typical of RNA encoded by miRNA genes, and is due to the fact that the nucleotide sequence of the first half of the RNA encoded by a miRNA gene is an accurate or partial inversed-reversed sequence of the nucleotide sequence of the second half thereof.

[4620] An enzyme complex designated DICER COMPLEX, dices the VGAM333 folded precursor RNA, herein designated VGAM FOLDED PRECURSOR RNA, into VGAM333 RNA, herein designated VGAM RNA, a single stranded ˜22 nt long RNA segment. As is known in the art, dicing of a hairpin structured RNA precursor product into a short ˜22 nt RNA segment is catalyzed by an enzyme complex comprising an enzyme called Dicer together with other necessary proteins. A probable (over 75%) nucleotide sequence of VGAM333 RNA is designated SEQ ID:668, and is provided hereinbelow with reference to the sequence listing part.

[4621] VGAM333 host target gene, herein designated VGAM HOST TARGET GENE, encodes a corresponding messenger RNA, VGAM333 host target RNA, herein designated VGAM HOST TARGET RNA. VGAM333 host target RNA, herein designated VGAM HOST TARGET RNA, comprises three regions, as is typical of mRNA of a protein coding gene: a 5 untranslated region, a protein coding region and a 3 untranslated region, designated 5UTR, PROTEIN CODING and 3UTR respectively.

[4622] VGAM333 RNA, herein designated VGAM RNA, binds complementarily to one or more host target binding sites located in untranslated regions of VGAM333 host target RNA, herein designated VGAM HOST TARGET RNA. This complementary binding is due to the fact that the nucleotide sequence of VGAM333 RNA, herein designated VGAM RNA, is an accurate or a partial inversed-reversed sequence of the nucleotide sequence of each of the host target binding sites. As an illustration, FIG. 1 shows 3 such host target binding sites, designated BINDING SITE I, BINDING SITE II and BINDING SITE III respectively. It is appreciated that the number of host target binding sites shown in FIG. 1 is meant as an illustration only, and is not meant to be limiting VGAM333 RNA, herein designated VGAM RNA, may have a different number of host target binding sites in untranslated regions of a VGAM333 host target RNA, herein designated VGAM HOST TARGET RNA. It is further appreciated that while FIG. 1 depicts host target binding sites in the 3UTR region, this is meant as an example only these host target binding sites may be located in the 3UTR region, the 5UTR region, or in both 3UTR and 5UTR regions.

[4623] The complementary binding of VGAM333 RNA, herein designated VGAM RNA, to host target binding sites on VGAM333 host target RNA, herein designated VGAM HOST TARGET RNA, such as BINDING SITE I, BINDING SITE II and BINDING SITE III, inhibits translation of VGAM333 host target RNA, herein designated VGAM HOST TARGET RNA, into VGAM333 host target protein, herein designated VGAM HOST TARGET PROTEIN. VGAM host target protein is therefore outlined by a broken line.

[4624] It is appreciated that VGAM333 host target gene, herein designated VGAM HOST TARGET GENE, in fact represents a plurality of VGAM333 host target genes. The mRNA of each one of this plurality of VGAM333 host target genes comprises one or more host target binding sites, each having a nucleotide sequence which is at least partly complementary to VGAM333 RNA, herein designated VGAM RNA, and which when bound by VGAM333 RNA, herein designated VGAM RNA, causes inhibition of translation of respective one or more VGAM333 host target proteins.

[4625] It is further appreciated by one skilled in the art that the mode of translational inhibition illustrated by FIG. 1 with specific reference to translational inhibition exerted by VGAM333 gene, herein designated VGAM GENE, on one or more VGAM333 host target gene, herein designated VGAM HOST TARGET GENE, is in fact common to other known non-viral miRNA genes. As mentioned hereinabove with reference to the background section, although a specific complementary binding site has been demonstrated only for some of the known miRNA genes (primarily Lin-4 and Let-7), all other recently discovered miRNA genes are also believed by those skilled in the art to modulate expression of other genes by complementary binding, although specific complementary binding sites of these other miRNA genes have not yet been found (Ruvkun G., Perspective: Glimpses of a tiny RNA world, Science 294, 779 (2001)).

[4626] It is yet further appreciated that a function of VGAM333 is inhibition of expression of host target genes, as part of a novel viral mechanism of attacking a host. Accordingly, utilities of VGAM333 include diagnosis, prevention and treatment of viral infection by Vaccinia virus. Specific functions, and accordingly utilities, of VGAM333 correlate with, and may be deduced from, the identity of the host target genes which VGAM333 binds and inhibits, and the function of these host target genes, as elaborated hereinbelow.

[4627] Nucleotide sequences of the VGAM333 precursor RNA, herein designated VGAM PRECURSOR RNA, and of the diced VGAM333 RNA, herein designated VGAM RNA, and a schematic representation of the secondary folding of VGAM333 folded precursor RNA, herein designated VGAM FOLDED PRECURSOR RNA, of VGAM333 are further described hereinbelow with reference to Table 1.

[4628] Nucleotide sequences of host target binding sites, such as BINDING SITE-I, BINDING SITE-II and BINDING SITE-III of FIG. 1, found on, and schematic representation of the complementarity of each of these host target binding sites to VGAM333 RNA, herein designated VGAM RNA, are described hereinbelow with reference to Table 2.

[4629] FIG. 1 further provides a conceptual description of another novel bioinformatically detected viral gene of the present invention, referred to here as Viral Genomic Address Messenger 334 (VGAM334) viral gene, which modulates expression of respective host target genes thereof, the function and utility of which host target genes is known in the art.

[4630] VGAM334 is a novel bioinformatically detected regulatory, non protein coding, viral micro RNA (miRNA) gene. The method by which VGAM334 was detected is described hereinabove with reference to FIGS. 2-8.

[4631] VGAM334 gene, herein designated VGAM GENE, is a viral gene contained in the genome of Vaccinia virus. VGAM334 host target gene, herein designated VGAM HOST TARGET GENE, is a human gene contained in the human genome.

[4632] VGAM334 gene, herein designated VGAM GENE, encodes a VGAM334 precursor RNA, herein designated VGAM PRECURSOR RNA. Similar to other miRNA genes, and unlike most ordinary genes, VGAM334 precursor RNA, herein designated VGAM PRECURSOR RNA, does not encode a protein. A nucleotide sequence identical or highly similar to the nucleotide sequence of VGAM334 precursor RNA is designated SEQ ID:320, and is provided hereinbelow with reference to the sequence listing part. Nucleotide sequence SEQ ID:320 is located at position 190758 relative to the genome of Vaccinia virus.

[4633] VGAM334 precursor RNA, herein designated VGAM PRECURSOR RNA, folds onto itself, forming VGAM334 folded precursor RNA, herein designated VGAM FOLDED PRECURSOR RNA, which has a two-dimensional hairpin structure. As is well known in the art, this hairpin structure, is typical of RNA encoded by miRNA genes, and is due to the fact that the nucleotide sequence of the first half of the RNA encoded by a miRNA gene is an accurate or partial inversed-reversed sequence of the nucleotide sequence of the second half thereof.

[4634] An enzyme complex designated DICER COMPLEX, dices the VGAM334 folded precursor RNA, herein designated VGAM FOLDED PRECURSOR RNA, into VGAM334 RNA, herein designated VGAM RNA, a single stranded ˜22 nt long RNA segment. As is known in the art, dicing of a hairpin structured RNA precursor product into a short ˜22 nt RNA segment is catalyzed by an enzyme complex comprising an enzyme called Dicer together with other necessary proteins. A probable (over 75%) nucleotide sequence of VGAM334 RNA is designated SEQ ID:669, and is provided hereinbelow with reference to the sequence listing part.

[4635] VGAM334 host target gene, herein designated VGAM HOST TARGET GENE, encodes a corresponding messenger RNA, VGAM334 host target RNA, herein designated VGAM HOST TARGET RNA. VGAM334 host target RNA, herein designated VGAM HOST TARGET RNA, comprises three regions, as is typical of mRNA of a protein coding gene: a 5 untranslated region, a protein coding region and a 3 untranslated region, designated 5UTR, PROTEIN CODING and 3UTR respectively.

[4636] VGAM334 RNA, herein designated VGAM RNA, binds complementarily to one or more host target binding sites located in untranslated regions of VGAM334 host target RNA, herein designated VGAM HOST TARGET RNA. This complementary binding is due to the fact that the nucleotide sequence of VGAM334 RNA, herein designated VGAM RNA, is an accurate or a partial inversed-reversed sequence of the nucleotide sequence of each of the host target binding sites. As an illustration, FIG. 1 shows 3 such host target binding sites, designated BINDING SITE I, BINDING SITE II and BINDING SITE III respectively. It is appreciated that the number of host target binding sites shown in FIG. 1 is meant as an illustration only, and is not meant to be limiting VGAM334 RNA, herein designated VGAM RNA, may have a different number of host target binding sites in untranslated regions of a VGAM334 host target RNA, herein designated VGAM HOST TARGET RNA. It is further appreciated that while FIG. 1 depicts host target binding sites in the 3UTR region, this is meant as an example only these host target binding sites may be located in the 3UTR region, the 5UTR region, or in both 3UTR and 5UTR regions.

[4637] The complementary binding of VGAM334 RNA, herein designated VGAM RNA, to host target binding sites on VGAM334 host target RNA, herein designated VGAM HOST TARGET RNA, such as BINDING SITE I, BINDING SITE II and BINDING SITE III, inhibits translation of VGAM334 host target RNA, herein designated VGAM HOST TARGET RNA, into VGAM334 host target protein, herein designated VGAM HOST TARGET PROTEIN. VGAM host target protein is therefore outlined by a broken line.

[4638] It is appreciated that VGAM334 host target gene, herein designated VGAM HOST TARGET GENE, in fact represents a plurality of VGAM334 host target genes. The mRNA of each one of this plurality of VGAM334 host target genes comprises one or more host target binding sites, each having a nucleotide sequence which is at least partly complementary to VGAM334 RNA, herein designated VGAM RNA, and which when bound by VGAM334 RNA, herein designated VGAM RNA, causes inhibition of translation of respective one or more VGAM334 host target proteins.

[4639] It is further appreciated by one skilled in the art that the mode of translational inhibition illustrated by FIG. 1 with specific reference to translational inhibition exerted by VGAM334 gene, herein designated VGAM GENE, on one or more VGAM334 host target gene, herein designated VGAM HOST TARGET GENE, is in fact common to other known non-viral miRNA genes. As mentioned hereinabove with reference to the background section, although a specific complementary binding site has been demonstrated only for some of the known miRNA genes (primarily Lin-4 and Let-7), all other recently discovered miRNA genes are also believed by those skilled in the art to modulate expression of other genes by complementary binding, although specific complementary binding sites of these other miRNA genes have not yet been found (Ruvkun G., Perspective: Glimpses of a tiny RNA world, Science 294, 779 (2001)).

[4640] It is yet further appreciated that a function of VGAM334 is inhibition of expression of host target genes, as part of a novel viral mechanism of attacking a host. Accordingly, utilities of VGAM334 include diagnosis, prevention and treatment of viral infection by Vaccinia virus. Specific functions, and accordingly utilities, of VGAM334 correlate with, and may be deduced from, the identity of the host target genes which VGAM334 binds and inhibits, and the function of these host target genes, as elaborated hereinbelow.

[4641] Nucleotide sequences of the VGAM334 precursor RNA, herein designated VGAM PRECURSOR RNA, and of the diced VGAM334 RNA, herein designated VGAM RNA, and a schematic representation of the secondary folding of VGAM334 folded precursor RNA, herein designated VGAM FOLDED PRECURSOR RNA, of VGAM334 are further described hereinbelow with reference to Table 1.

[4642] Nucleotide sequences of host target binding sites, such as BINDING SITE-I, BINDING SITE-II and BINDING SITE-III of FIG. 1, found on, and schematic representation of the complementarity of each of these host target binding sites to VGAM334 RNA, herein designated VGAM RNA, are described hereinbelow with reference to Table 2.

[4643] FIG. 1 further provides a conceptual description of another novel bioinformatically detected viral gene of the present invention, referred to here as Viral Genomic Address Messenger 335 (VGAM335) viral gene, which modulates expression of respective host target genes thereof, the function and utility of which host target genes is known in the art.

[4644] VGAM335 is a novel bioinformatically detected regulatory, non protein coding, viral micro RNA (miRNA) gene. The method by which VGAM335 was detected is described hereinabove with reference to FIGS. 2-8.

[4645] VGAM335 gene, herein designated VGAM GENE, is a viral gene contained in the genome of Vaccinia virus. VGAM335 host target gene, herein designated VGAM HOST TARGET GENE, is a human gene contained in the human genome.

[4646] VGAM335 gene, herein designated VGAM GENE, encodes a VGAM335 precursor RNA, herein designated VGAM PRECURSOR RNA. Similar to other miRNA genes, and unlike most ordinary genes, VGAM335 precursor RNA, herein designated VGAM PRECURSOR RNA, does not encode a protein. A nucleotide sequence identical or highly similar to the nucleotide sequence of VGAM335 precursor RNA is designated SEQ ID:321, and is provided hereinbelow with reference to the sequence listing part. Nucleotide sequence SEQ ID:321 is located at position 190758 relative to the genome of Vaccinia virus.

[4647] VGAM335 precursor RNA, herein designated VGAM PRECURSOR RNA, folds onto itself, forming VGAM335 folded precursor RNA, herein designated VGAM FOLDED PRECURSOR RNA, which has a two-dimensional hairpin structure. As is well known in the art, this hairpin structure, is typical of RNA encoded by miRNA genes, and is due to the fact that the nucleotide sequence of the first half of the RNA encoded by a miRNA gene is an accurate or partial inversed-reversed sequence of the nucleotide sequence of the second half thereof.

[4648] An enzyme complex designated DICER COMPLEX, dices the VGAM335 folded precursor RNA, herein designated VGAM FOLDED PRECURSOR RNA, into VGAM335 RNA, herein designated VGAM RNA, a single stranded ˜22 nt long RNA segment. As is known in the art, dicing of a hairpin structured RNA precursor product into a short ˜22 nt RNA segment is catalyzed by an enzyme complex comprising an enzyme called Dicer together with other necessary proteins. A probable (over 75%) nucleotide sequence of VGAM335 RNA is designated SEQ ID:670, and is provided hereinbelow with reference to the sequence listing part.

[4649] VGAM335 host target gene, herein designated VGAM HOST TARGET GENE, encodes a corresponding messenger RNA, VGAM335 host target RNA, herein designated VGAM HOST TARGET RNA. VGAM335 host target RNA, herein designated VGAM HOST TARGET RNA, comprises three regions, as is typical of mRNA of a protein coding gene: a 5 untranslated region, a protein coding region and a 3 untranslated region, designated 5UTR, PROTEIN CODING and 3UTR respectively.

[4650] VGAM335 RNA, herein designated VGAM RNA, binds complementarily to one or more host target binding sites located in untranslated regions of VGAM335 host target RNA, herein designated VGAM HOST TARGET RNA. This complementary binding is due to the fact that the nucleotide sequence of VGAM335 RNA, herein designated VGAM RNA, is an accurate or a partial inversed-reversed sequence of the nucleotide sequence of each of the host target binding sites. As an illustration, FIG. 1 shows 3 such host target binding sites, designated BINDING SITE I, BINDING SITE II and BINDING SITE III respectively. It is appreciated that the number of host target binding sites shown in FIG. 1 is meant as an illustration only, and is not meant to be limiting VGAM335 RNA, herein designated VGAM RNA, may have a different number of host target binding sites in untranslated regions of a VGAM335 host target RNA, herein designated VGAM HOST TARGET RNA. It is further appreciated that while FIG. 1 depicts host target binding sites in the 3UTR region, this is meant as an example only these host target binding sites may be located in the 3UTR region, the 5UTR region, or in both 3UTR and 5UTR regions.

[4651] The complementary binding of VGAM335 RNA, herein designated VGAM RNA, to host target binding sites on VGAM335 host target RNA, herein designated VGAM HOST TARGET RNA, such as BINDING SITE I, BINDING SITE II and BINDING SITE III, inhibits translation of VGAM335 host target RNA, herein designated VGAM HOST TARGET RNA, into VGAM335 host target protein, herein designated VGAM HOST TARGET PROTEIN. VGAM host target protein is therefore outlined by a broken line.

[4652] It is appreciated that VGAM335 host target gene, herein designated VGAM HOST TARGET GENE, in fact represents a plurality of VGAM335 host target genes. The mRNA of each one of this plurality of VGAM335 host target genes comprises one or more host target binding sites, each having a nucleotide sequence which is at least partly complementary to VGAM335 RNA, herein designated VGAM RNA, and which when bound by VGAM335 RNA, herein designated VGAM RNA, causes inhibition of translation of respective one or more VGAM335 host target proteins.

[4653] It is further appreciated by one skilled in the art that the mode of translational inhibition illustrated by FIG. 1 with specific reference to translational inhibition exerted by VGAM335 gene, herein designated VGAM GENE, on one or more VGAM335 host target gene, herein designated VGAM HOST TARGET GENE, is in fact common to other known non-viral miRNA genes. As mentioned hereinabove with reference to the background section, although a specific complementary binding site has been demonstrated only for some of the known miRNA genes (primarily Lin-4 and Let-7), all other recently discovered miRNA genes are also believed by those skilled in the art to modulate expression of other genes by complementary binding, although specific complementary binding sites of these other miRNA genes have not yet been found (Ruvkun G., Perspective: Glimpses of a tiny RNA world, Science 294, 779 (2001)).

[4654] It is yet further appreciated that a function of VGAM335 is inhibition of expression of host target genes, as part of a novel viral mechanism of attacking a host. Accordingly, utilities of VGAM335 include diagnosis, prevention and treatment of viral infection by Vaccinia virus. Specific functions, and accordingly utilities, of VGAM335 correlate with, and may be deduced from, the identity of the host target genes which VGAM335 binds and inhibits, and the function of these host target genes, as elaborated hereinbelow.

[4655] Nucleotide sequences of the VGAM335 precursor RNA, herein designated VGAM PRECURSOR RNA, and of the diced VGAM335 RNA, herein designated VGAM RNA, and a schematic representation of the secondary folding of VGAM335 folded precursor RNA, herein designated VGAM FOLDED PRECURSOR RNA, of VGAM335 are further described hereinbelow with reference to Table 1.

[4656] Nucleotide sequences of host target binding sites, such as BINDING SITE-I, BINDING SITE-II and BINDING SITE-III of FIG. 1, found on, and schematic representation of the complementarity of each of these host target binding sites to VGAM335 RNA, herein designated VGAM RNA, are described hereinbelow with reference to Table 2.

[4657] FIG. 1 further provides a conceptual description of another novel bioinformatically detected viral gene of the present invention, referred to here as Viral Genomic Address Messenger 336 (VGAM336) viral gene, which modulates expression of respective host target genes thereof, the function and utility of which host target genes is known in the art.

[4658] VGAM336 is a novel bioinformatically detected regulatory, non protein coding, viral micro RNA (miRNA) gene. The method by which VGAM336 was detected is described hereinabove with reference to FIGS. 2-8.

[4659] VGAM336 gene, herein designated VGAM GENE, is a viral gene contained in the genome of Vaccinia virus. VGAM336 host target gene, herein designated VGAM HOST TARGET GENE, is a human gene contained in the human genome.

[4660] VGAM336 gene, herein designated VGAM GENE, encodes a VGAM336 precursor RNA, herein designated VGAM PRECURSOR RNA. Similar to other miRNA genes, and unlike most ordinary genes, VGAM336 precursor RNA, herein designated VGAM PRECURSOR RNA, does not encode a protein. A nucleotide sequence identical or highly similar to the nucleotide sequence of VGAM336 precursor RNA is designated SEQ ID:322, and is provided hereinbelow with reference to the sequence listing part. Nucleotide sequence SEQ ID:322 is located at position 188937 relative to the genome of Vaccinia virus.

[4661] VGAM336 precursor RNA, herein designated VGAM PRECURSOR RNA, folds onto itself, forming VGAM336 folded precursor RNA, herein designated VGAM FOLDED PRECURSOR RNA, which has a two-dimensional hairpin structure. As is well known in the art, this hairpin structure, is typical of RNA encoded by miRNA genes, and is due to the fact that the nucleotide sequence of the first half of the RNA encoded by a miRNA gene is an accurate or partial inversed-reversed sequence of the nucleotide sequence of the second half thereof.

[4662] An enzyme complex designated DICER COMPLEX, dices the VGAM336 folded precursor RNA, herein designated VGAM FOLDED PRECURSOR RNA, into VGAM336 RNA, herein designated VGAM RNA, a single stranded ˜22 nt long RNA segment. As is known in the art, dicing of a hairpin structured RNA precursor product into a short ˜22 nt RNA segment is catalyzed by an enzyme complex comprising an enzyme called Dicer together with other necessary proteins. A probable (over 77%) nucleotide sequence of VGAM336 RNA is designated SEQ ID:671, and is provided hereinbelow with reference to the sequence listing part.

[4663] VGAM336 host target gene, herein designated VGAM HOST TARGET GENE, encodes a corresponding messenger RNA, VGAM336 host target RNA, herein designated VGAM HOST TARGET RNA. VGAM336 host target RNA, herein designated VGAM HOST TARGET RNA, comprises three regions, as is typical of mRNA of a protein coding gene: a 5 untranslated region, a protein coding region and a 3 untranslated region, designated 5UTR, PROTEIN CODING and 3UTR respectively.

[4664] VGAM336 RNA, herein designated VGAM RNA, binds complementarily to one or more host target binding sites located in untranslated regions of VGAM336 host target RNA, herein designated VGAM HOST TARGET RNA. This complementary binding is due to the fact that the nucleotide sequence of VGAM336 RNA, herein designated VGAM RNA, is an accurate or a partial inversed-reversed sequence of the nucleotide sequence of each of the host target binding sites. As an illustration, FIG. 1 shows 3 such host target binding sites, designated BINDING SITE I, BINDING SITE II and BINDING SITE III respectively. It is appreciated that the number of host target binding sites shown in FIG. 1 is meant as an illustration only, and is not meant to be limiting VGAM336 RNA, herein designated VGAM RNA, may have a different number of host target binding sites in untranslated regions of a VGAM336 host target RNA, herein designated VGAM HOST TARGET RNA. It is further appreciated that while FIG. 1 depicts host target binding sites in the 3UTR region, this is meant as an example only these host target binding sites may be located in the 3UTR region, the 5UTR region, or in both 3UTR and 5UTR regions.

[4665] The complementary binding of VGAM336 RNA, herein designated VGAM RNA, to host target binding sites on VGAM336 host target RNA, herein designated VGAM HOST TARGET RNA, such as BINDING SITE I, BINDING SITE II and BINDING SITE III, inhibits translation of VGAM336 host target RNA, herein designated VGAM HOST TARGET RNA, into VGAM336 host target protein, herein designated VGAM HOST TARGET PROTEIN. VGAM host target protein is therefore outlined by a broken line.

[4666] It is appreciated that VGAM336 host target gene, herein designated VGAM HOST TARGET GENE, in fact represents a plurality of VGAM336 host target genes. The mRNA of each one of this plurality of VGAM336 host target genes comprises one or more host target binding sites, each having a nucleotide sequence which is at least partly complementary to VGAM336 RNA, herein designated VGAM RNA, and which when bound by VGAM336 RNA, herein designated VGAM RNA, causes inhibition of translation of respective one or more VGAM336 host target proteins.

[4667] It is further appreciated by one skilled in the art that the mode of translational inhibition illustrated by FIG. 1 with specific reference to translational inhibition exerted by VGAM336 gene, herein designated VGAM GENE, on one or more VGAM336 host target gene, herein designated VGAM HOST TARGET GENE, is in fact common to other known non-viral miRNA genes. As mentioned hereinabove with reference to the background section, although a specific complementary binding site has been demonstrated only for some of the known miRNA genes (primarily Lin-4 and Let-7), all other recently discovered miRNA genes are also believed by those skilled in the art to modulate expression of other genes by complementary binding, although specific complementary binding sites of these other miRNA genes have not yet been found (Ruvkun G., Perspective: Glimpses of a tiny RNA world, Science 294, 779 (2001)).

[4668] It is yet further appreciated that a function of VGAM336 is inhibition of expression of host target genes, as part of a novel viral mechanism of attacking a host. Accordingly, utilities of VGAM336 include diagnosis, prevention and treatment of viral infection by Vaccinia virus. Specific functions, and accordingly utilities, of VGAM336 correlate with, and may be deduced from, the identity of the host target genes which VGAM336 binds and inhibits, and the function of these host target genes, as elaborated hereinbelow.

[4669] Nucleotide sequences of the VGAM336 precursor RNA, herein designated VGAM PRECURSOR RNA, and of the diced VGAM336 RNA, herein designated VGAM RNA, and a schematic representation of the secondary folding of VGAM336 folded precursor RNA, herein designated VGAM FOLDED PRECURSOR RNA, of VGAM336 are further described hereinbelow with reference to Table 1.

[4670] Nucleotide sequences of host target binding sites, such as BINDING SITE-I, BINDING SITE-II and BINDING SITE-III of FIG. 1, found on, and schematic representation of the complementarity of each of these host target binding sites to VGAM336 RNA, herein designated VGAM RNA, are described hereinbelow with reference to Table 2.

[4671] FIG. 1 further provides a conceptual description of another novel bioinformatically detected viral gene of the present invention, referred to here as Viral Genomic Address Messenger 337 (VGAM337) viral gene, which modulates expression of respective host target genes thereof, the function and utility of which host target genes is known in the art.

[4672] VGAM337 is a novel bioinformatically detected regulatory, non protein coding, viral micro RNA (miRNA) gene. The method by which VGAM337 was detected is described hereinabove with reference to FIGS. 2-8.

[4673] VGAM337 gene, herein designated VGAM GENE, is a viral gene contained in the genome of Vaccinia virus. VGAM337 host target gene, herein designated VGAM HOST TARGET GENE, is a human gene contained in the human genome.

[4674] VGAM337 gene, herein designated VGAM GENE, encodes a VGAM337 precursor RNA, herein designated VGAM PRECURSOR RNA. Similar to other miRNA genes, and unlike most ordinary genes, VGAM337 precursor RNA, herein designated VGAM PRECURSOR RNA, does not encode a protein. A nucleotide sequence identical or highly similar to the nucleotide sequence of VGAM337 precursor RNA is designated SEQ ID:323, and is provided hereinbelow with reference to the sequence listing part. Nucleotide sequence SEQ ID:323 is located at position 187719 relative to the genome of Vaccinia virus.

[4675] VGAM337 precursor RNA, herein designated VGAM PRECURSOR RNA, folds onto itself, forming VGAM337 folded precursor RNA, herein designated VGAM FOLDED PRECURSOR RNA, which has a two-dimensional hairpin structure. As is well known in the art, this hairpin structure, is typical of RNA encoded by miRNA genes, and is due to the fact that the nucleotide sequence of the first half of the RNA encoded by a miRNA gene is an accurate or partial inversed-reversed sequence of the nucleotide sequence of the second half thereof.

[4676] An enzyme complex designated DICER COMPLEX, dices the VGAM337 folded precursor RNA, herein designated VGAM FOLDED PRECURSOR RNA, into VGAM337 RNA, herein designated VGAM RNA, a single stranded ˜22 nt long RNA segment. As is known in the art, dicing of a hairpin structured RNA precursor product into a short ˜22 nt RNA segment is catalyzed by an enzyme complex comprising an enzyme called Dicer together with other necessary proteins. A probable (over 88%) nucleotide sequence of VGAM337 RNA is designated SEQ ID:672, and is provided hereinbelow with reference to the sequence listing part.

[4677] VGAM337 host target gene, herein designated VGAM HOST TARGET GENE, encodes a corresponding messenger RNA, VGAM337 host target RNA, herein designated VGAM HOST TARGET RNA. VGAM337 host target RNA, herein designated VGAM HOST TARGET RNA, comprises three regions, as is typical of mRNA of a protein coding gene: a 5 untranslated region, a protein coding region and a 3 untranslated region, designated 5UTR, PROTEIN CODING and 3UTR respectively.

[4678] VGAM337 RNA, herein designated VGAM RNA, binds complementarily to one or more host target binding sites located in untranslated regions of VGAM337 host target RNA, herein designated VGAM HOST TARGET RNA. This complementary binding is due to the fact that the nucleotide sequence of VGAM337 RNA, herein designated VGAM RNA, is an accurate or a partial inversed-reversed sequence of the nucleotide sequence of each of the host target binding sites. As an illustration, FIG. 1 shows 3 such host target binding sites, designated BINDING SITE I, BINDING SITE II and BINDING SITE III respectively. It is appreciated that the number of host target binding sites shown in FIG. 1 is meant as an illustration only, and is not meant to be limiting VGAM337 RNA, herein designated VGAM RNA, may have a different number of host target binding sites in untranslated regions of a VGAM337 host target RNA, herein designated VGAM HOST TARGET RNA. It is further appreciated that while FIG. 1 depicts host target binding sites in the 3UTR region, this is meant as an example only these host target binding sites may be located in the 3UTR region, the 5UTR region, or in both 3UTR and 5UTR regions.

[4679] The complementary binding of VGAM337 RNA, herein designated VGAM RNA, to host target binding sites on VGAM337 host target RNA, herein designated VGAM HOST TARGET RNA, such as BINDING SITE I, BINDING SITE II and BINDING SITE III, inhibits translation of VGAM337 host target RNA, herein designated VGAM HOST TARGET RNA, into VGAM337 host target protein, herein designated VGAM HOST TARGET PROTEIN. VGAM host target protein is therefore outlined by a broken line.

[4680] It is appreciated that VGAM337 host target gene, herein designated VGAM HOST TARGET GENE, in fact represents a plurality of VGAM337 host target genes. The mRNA of each one of this plurality of VGAM337 host target genes comprises one or more host target binding sites, each having a nucleotide sequence which is at least partly complementary to VGAM337 RNA, herein designated VGAM RNA, and which when bound by VGAM337 RNA, herein designated VGAM RNA, causes inhibition of translation of respective one or more VGAM337 host target proteins.

[4681] It is further appreciated by one skilled in the art that the mode of translational inhibition illustrated by FIG. 1 with specific reference to translational inhibition exerted by VGAM337 gene, herein designated VGAM GENE, on one or more VGAM337 host target gene, herein designated VGAM HOST TARGET GENE, is in fact common to other known non-viral miRNA genes. As mentioned hereinabove with reference to the background section, although a specific complementary binding site has been demonstrated only for some of the known miRNA genes (primarily Lin-4 and Let-7), all other recently discovered miRNA genes are also believed by those skilled in the art to modulate expression of other genes by complementary binding, although specific complementary binding sites of these other miRNA genes have not yet been found (Ruvkun G., Perspective: Glimpses of a tiny RNA world, Science 294, 779 (2001)).

[4682] It is yet further appreciated that a function of VGAM337 is inhibition of expression of host target genes, as part of a novel viral mechanism of attacking a host. Accordingly, utilities of VGAM337 include diagnosis, prevention and treatment of viral infection by Vaccinia virus. Specific functions, and accordingly utilities, of VGAM337 correlate with, and may be deduced from, the identity of the host target genes which VGAM337 binds and inhibits, and the function of these host target genes, as elaborated hereinbelow.

[4683] Nucleotide sequences of the VGAM337 precursor RNA, herein designated VGAM PRECURSOR RNA, and of the diced VGAM337 RNA, herein designated VGAM RNA, and a schematic representation of the secondary folding of VGAM337 folded precursor RNA, herein designated VGAM FOLDED PRECURSOR RNA, of VGAM337 are further described hereinbelow with reference to Table 1.

[4684] Nucleotide sequences of host target binding sites, such as BINDING SITE-I, BINDING SITE-II and BINDING SITE-III of FIG. 1, found on, and schematic representation of the complementarity of each of these host target binding sites to VGAM337 RNA, herein designated VGAM RNA, are described hereinbelow with reference to Table 2.

[4685] FIG. 1 further provides a conceptual description of another novel bioinformatically detected viral gene of the present invention, referred to here as Viral Genomic Address Messenger 338 (VGAM338) viral gene, which modulates expression of respective host target genes thereof, the function and utility of which host target genes is known in the art.

[4686] VGAM338 is a novel bioinformatically detected regulatory, non protein coding, viral micro RNA (miRNA) gene. The method by which VGAM338 was detected is described hereinabove with reference to FIGS. 2-8.

[4687] VGAM338 gene, herein designated VGAM GENE, is a viral gene contained in the genome of Vaccinia virus. VGAM338 host target gene, herein designated VGAM HOST TARGET GENE, is a human gene contained in the human genome.

[4688] VGAM338 gene, herein designated VGAM GENE, encodes a VGAM338 precursor RNA, herein designated VGAM PRECURSOR RNA. Similar to other miRNA genes, and unlike most ordinary genes, VGAM338 precursor RNA, herein designated VGAM PRECURSOR RNA, does not encode a protein. A nucleotide sequence identical or highly similar to the nucleotide sequence of VGAM338 precursor RNA is designated SEQ ID:324, and is provided hereinbelow with reference to the sequence listing part. Nucleotide sequence SEQ ID:324 is located at position 188420 relative to the genome of Vaccinia virus.

[4689] VGAM338 precursor RNA, herein designated VGAM PRECURSOR RNA, folds onto itself, forming VGAM338 folded precursor RNA, herein designated VGAM FOLDED PRECURSOR RNA, which has a two-dimensional hairpin structure. As is well known in the art, this hairpin structure, is typical of RNA encoded by miRNA genes, and is due to the fact that the nucleotide sequence of the first half of the RNA encoded by a miRNA gene is an accurate or partial inversed-reversed sequence of the nucleotide sequence of the second half thereof.

[4690] An enzyme complex designated DICER COMPLEX, dices the VGAM338 folded precursor RNA, herein designated VGAM FOLDED PRECURSOR RNA, into VGAM338 RNA, herein designated VGAM RNA, a single stranded ˜22 nt long RNA segment. As is known in the art, dicing of a hairpin structured RNA precursor product into a short ˜22 nt RNA segment is catalyzed by an enzyme complex comprising an enzyme called Dicer together with other necessary proteins. A probable (over 80%) nucleotide sequence of VGAM338 RNA is designated SEQ ID:673, and is provided hereinbelow with reference to the sequence listing part.

[4691] VGAM338 host target gene, herein designated VGAM HOST TARGET GENE, encodes a corresponding messenger RNA, VGAM338 host target RNA, herein designated VGAM HOST TARGET RNA. VGAM338 host target RNA, herein designated VGAM HOST TARGET RNA, comprises three regions, as is typical of mRNA of a protein coding gene: a 5 untranslated region, a protein coding region and a 3 untranslated region, designated 5UTR, PROTEIN CODING and 3UTR respectively.

[4692] VGAM338 RNA, herein designated VGAM RNA, binds complementarily to one or more host target binding sites located in untranslated regions of VGAM338 host target RNA, herein designated VGAM HOST TARGET RNA. This complementary binding is due to the fact that the nucleotide sequence of VGAM338 RNA, herein designated VGAM RNA, is an accurate or a partial inversed-reversed sequence of the nucleotide sequence of each of the host target binding sites. As an illustration, FIG. 1 shows 3 such host target binding sites, designated BINDING SITE I, BINDING SITE II and BINDING SITE III respectively. It is appreciated that the number of host target binding sites shown in FIG. 1 is meant as an illustration only, and is not meant to be limiting VGAM338 RNA, herein designated VGAM RNA, may have a different number of host target binding sites in untranslated regions of a VGAM338 host target RNA, herein designated VGAM HOST TARGET RNA. It is further appreciated that while FIG. 1 depicts host target binding sites in the 3UTR region, this is meant as an example only these host target binding sites may be located in the 3UTR region, the 5UTR region, or in both 3UTR and 5UTR regions.

[4693] The complementary binding of VGAM338 RNA, herein designated VGAM RNA, to host target binding sites on VGAM338 host target RNA, herein designated VGAM HOST TARGET RNA, such as BINDING SITE I, BINDING SITE II and BINDING SITE III, inhibits translation of VGAM338 host target RNA, herein designated VGAM HOST TARGET RNA, into VGAM338 host target protein, herein designated VGAM HOST TARGET PROTEIN. VGAM host target protein is therefore outlined by a broken line.

[4694] It is appreciated that VGAM338 host target gene, herein designated VGAM HOST TARGET GENE, in fact represents a plurality of VGAM338 host target genes. The mRNA of each one of this plurality of VGAM338 host target genes comprises one or more host target binding sites, each having a nucleotide sequence which is at least partly complementary to VGAM338 RNA, herein designated VGAM RNA, and which when bound by VGAM338 RNA, herein designated VGAM RNA, causes inhibition of translation of respective one or more VGAM338 host target proteins.

[4695] It is further appreciated by one skilled in the art that the mode of translational inhibition illustrated by FIG. 1 with specific reference to translational inhibition exerted by VGAM338 gene, herein designated VGAM GENE, on one or more VGAM338 host target gene, herein designated VGAM HOST TARGET GENE, is in fact common to other known non-viral miRNA genes. As mentioned hereinabove with reference to the background section, although a specific complementary binding site has been demonstrated only for some of the known miRNA genes (primarily Lin-4 and Let-7), all other recently discovered miRNA genes are also believed by those skilled in the art to modulate expression of other genes by complementary binding, although specific complementary binding sites of these other miRNA genes have not yet been found (Ruvkun G., Perspective: Glimpses of a tiny RNA world, Science 294, 779 (2001)).

[4696] It is yet further appreciated that a function of VGAM338 is inhibition of expression of host target genes, as part of a novel viral mechanism of attacking a host. Accordingly, utilities of VGAM338 include diagnosis, prevention and treatment of viral infection by Vaccinia virus. Specific functions, and accordingly utilities, of VGAM338 correlate with, and may be deduced from, the identity of the host target genes which VGAM338 binds and inhibits, and the function of these host target genes, as elaborated hereinbelow.

[4697] Nucleotide sequences of the VGAM338 precursor RNA, herein designated VGAM PRECURSOR RNA, and of the diced VGAM338 RNA, herein designated VGAM RNA, and a schematic representation of the secondary folding of VGAM338 folded precursor RNA, herein designated VGAM FOLDED PRECURSOR RNA, of VGAM338 are further described hereinbelow with reference to Table 1.

[4698] Nucleotide sequences of host target binding sites, such as BINDING SITE-I, BINDING SITE-II and BINDING SITE-III of FIG. 1, found on, and schematic representation of the complementarity of each of these host target binding sites to VGAM338 RNA, herein designated VGAM RNA, are described hereinbelow with reference to Table 2.

[4699] FIG. 1 further provides a conceptual description of another novel bioinformatically detected viral gene of the present invention, referred to here as Viral Genomic Address Messenger 339 (VGAM339) viral gene, which modulates expression of respective host target genes thereof, the function and utility of which host target genes is known in the art.

[4700] VGAM339 is a novel bioinformatically detected regulatory, non protein coding, viral micro RNA (miRNA) gene. The method by which VGAM339 was detected is described hereinabove with reference to FIGS. 2-8.

[4701] VGAM339 gene, herein designated VGAM GENE, is a viral gene contained in the genome of Vaccinia virus. VGAM339 host target gene, herein designated VGAM HOST TARGET GENE, is a human gene contained in the human genome.

[4702] VGAM339 gene, herein designated VGAM GENE, encodes a VGAM339 precursor RNA, herein designated VGAM PRECURSOR RNA. Similar to other miRNA genes, and unlike most ordinary genes, VGAM339 precursor RNA, herein designated VGAM PRECURSOR RNA, does not encode a protein. A nucleotide sequence identical or highly similar to the nucleotide sequence of VGAM339 precursor RNA is designated SEQ ID:325, and is provided hereinbelow with reference to the sequence listing part. Nucleotide sequence SEQ ID:325 is located at position 190813 relative to the genome of Vaccinia virus.

[4703] VGAM339 precursor RNA, herein designated VGAM PRECURSOR RNA, folds onto itself, forming VGAM339 folded precursor RNA, herein designated VGAM FOLDED PRECURSOR RNA, which has a two-dimensional hairpin structure. As is well known in the art, this hairpin structure, is typical of RNA encoded by miRNA genes, and is due to the fact that the nucleotide sequence of the first half of the RNA encoded by a miRNA gene is an accurate or partial inversed-reversed sequence of the nucleotide sequence of the second half thereof.

[4704] An enzyme complex designated DICER COMPLEX, dices the VGAM339 folded precursor RNA, herein designated VGAM FOLDED PRECURSOR RNA, into VGAM339 RNA, herein designated VGAM RNA, a single stranded ˜22 nt long RNA segment. As is known in the art, dicing of a hairpin structured RNA precursor product into a short ˜22 nt RNA segment is catalyzed by an enzyme complex comprising an enzyme called Dicer together with other necessary proteins. A probable (over 82%) nucleotide sequence of VGAM339 RNA is designated SEQ ID:674, and is provided hereinbelow with reference to the sequence listing part.

[4705] VGAM339 host target gene, herein designated VGAM HOST TARGET GENE, encodes a corresponding messenger RNA, VGAM339 host target RNA, herein designated VGAM HOST TARGET RNA. VGAM339 host target RNA, herein designated VGAM HOST TARGET RNA, comprises three regions, as is typical of mRNA of a protein coding gene: a 5 untranslated region, a protein coding region and a 3 untranslated region, designated 5UTR, PROTEIN CODING and 3UTR respectively.

[4706] VGAM339 RNA, herein designated VGAM RNA, binds complementarily to one or more host target binding sites located in untranslated regions of VGAM339 host target RNA, herein designated VGAM HOST TARGET RNA. This complementary binding is due to the fact that the nucleotide sequence of VGAM339 RNA, herein designated VGAM RNA, is an accurate or a partial inversed-reversed sequence of the nucleotide sequence of each of the host target binding sites. As an illustration, FIG. 1 shows 3 such host target binding sites, designated BINDING SITE I, BINDING SITE II and BINDING SITE III respectively. It is appreciated that the number of host target binding sites shown in FIG. 1 is meant as an illustration only, and is not meant to be limiting VGAM339 RNA, herein designated VGAM RNA, may have a different number of host target binding sites in untranslated regions of a VGAM339 host target RNA, herein designated VGAM HOST TARGET RNA. It is further appreciated that while FIG. 1 depicts host target binding sites in the 3UTR region, this is meant as an example only these host target binding sites may be located in the 3UTR region, the 5UTR region, or in both 3UTR and 5UTR regions.

[4707] The complementary binding of VGAM339 RNA, herein designated VGAM RNA, to host target binding sites on VGAM339 host target RNA, herein designated VGAM HOST TARGET RNA, such as BINDING SITE I, BINDING SITE II and BINDING SITE III, inhibits translation of VGAM339 host target RNA, herein designated VGAM HOST TARGET RNA, into VGAM339 host target protein, herein designated VGAM HOST TARGET PROTEIN. VGAM host target protein is therefore outlined by a broken line.

[4708] It is appreciated that VGAM339 host target gene, herein designated VGAM HOST TARGET GENE, in fact represents a plurality of VGAM339 host target genes. The mRNA of each one of this plurality of VGAM339 host target genes comprises one or more host target binding sites, each having a nucleotide sequence which is at least partly complementary to VGAM339 RNA, herein designated VGAM RNA, and which when bound by VGAM339 RNA, herein designated VGAM RNA, causes inhibition of translation of respective one or more VGAM339 host target proteins.

[4709] It is further appreciated by one skilled in the art that the mode of translational inhibition illustrated by FIG. 1 with specific reference to translational inhibition exerted by VGAM339 gene, herein designated VGAM GENE, on one or more VGAM339 host target gene, herein designated VGAM HOST TARGET GENE, is in fact common to other known non-viral miRNA genes. As mentioned hereinabove with reference to the background section, although a specific complementary binding site has been demonstrated only for some of the known miRNA genes (primarily Lin-4 and Let-7), all other recently discovered miRNA genes are also believed by those skilled in the art to modulate expression of other genes by complementary binding, although specific complementary binding sites of these other miRNA genes have not yet been found (Ruvkun G., Perspective: Glimpses of a tiny RNA world, Science 294, 779 (2001)).

[4710] It is yet further appreciated that a function of VGAM339 is inhibition of expression of host target genes, as part of a novel viral mechanism of attacking a host. Accordingly, utilities of VGAM339 include diagnosis, prevention and treatment of viral infection by Vaccinia virus. Specific functions, and accordingly utilities, of VGAM339 correlate with, and may be deduced from, the identity of the host target genes which VGAM339 binds and inhibits, and the function of these host target genes, as elaborated hereinbelow.

[4711] Nucleotide sequences of the VGAM339 precursor RNA, herein designated VGAM PRECURSOR RNA, and of the diced VGAM339 RNA, herein designated VGAM RNA, and a schematic representation of the secondary folding of VGAM339 folded precursor RNA, herein designated VGAM FOLDED PRECURSOR RNA, of VGAM339 are further described hereinbelow with reference to Table 1.

[4712] Nucleotide sequences of host target binding sites, such as BINDING SITE-I, BINDING SITE-II and BINDING SITE-III of FIG. 1, found on, and schematic representation of the complementarity of each of these host target binding sites to VGAM339 RNA, herein designated VGAM RNA, are described hereinbelow with reference to Table 2.

[4713] FIG. 1 further provides a conceptual description of another novel bioinformatically detected viral gene of the present invention, referred to here as Viral Genomic Address Messenger 340 (VGAM340) viral gene, which modulates expression of respective host target genes thereof, the function and utility of which host target genes is known in the art.

[4714] VGAM340 is a novel bioinformatically detected regulatory, non protein coding, viral micro RNA (miRNA) gene. The method by which VGAM340 was detected is described hereinabove with reference to FIGS. 2-8.

[4715] VGAM340 gene, herein designated VGAM GENE, is a viral gene contained in the genome of Vaccinia virus. VGAM340 host target gene, herein designated VGAM HOST TARGET GENE, is a human gene contained in the human genome.

[4716] VGAM340 gene, herein designated VGAM GENE, encodes a VGAM340 precursor RNA, herein designated VGAM PRECURSOR RNA. Similar to other miRNA genes, and unlike most ordinary genes, VGAM340 precursor RNA, herein designated VGAM PRECURSOR RNA, does not encode a protein. A nucleotide sequence identical or highly similar to the nucleotide sequence of VGAM340 precursor RNA is designated SEQ ID:326, and is provided hereinbelow with reference to the sequence listing part. Nucleotide sequence SEQ ID:326 is located at position 188778 relative to the genome of Vaccinia virus.

[4717] VGAM340 precursor RNA, herein designated VGAM PRECURSOR RNA, folds onto itself, forming VGAM340 folded precursor RNA, herein designated VGAM FOLDED PRECURSOR RNA, which has a two-dimensional hairpin structure. As is well known in the art, this hairpin structure, is typical of RNA encoded by miRNA genes, and is due to the fact that the nucleotide sequence of the first half of the RNA encoded by a miRNA gene is an accurate or partial inversed-reversed sequence of the nucleotide sequence of the second half thereof.

[4718] An enzyme complex designated DICER COMPLEX, dices the VGAM340 folded precursor RNA, herein designated VGAM FOLDED PRECURSOR RNA, into VGAM340 RNA, herein designated VGAM RNA, a single stranded ˜22 nt long RNA segment. As is known in the art, dicing of a hairpin structured RNA precursor product into a short ˜22 nt RNA segment is catalyzed by an enzyme complex comprising an enzyme called Dicer together with other necessary proteins. A probable (over 90%) nucleotide sequence of VGAM340 RNA is designated SEQ ID:675, and is provided hereinbelow with reference to the sequence listing part.

[4719] VGAM340 host target gene, herein designated VGAM HOST TARGET GENE, encodes a corresponding messenger RNA, VGAM340 host target RNA, herein designated VGAM HOST TARGET RNA. VGAM340 host target RNA, herein designated VGAM HOST TARGET RNA, comprises three regions, as is typical of mRNA of a protein coding gene: a 5 untranslated region, a protein coding region and a 3 untranslated region, designated 5UTR, PROTEIN CODING and 3UTR respectively.

[4720] VGAM340 RNA, herein designated VGAM RNA, binds complementarily to one or more host target binding sites located in untranslated regions of VGAM340 host target RNA, herein designated VGAM HOST TARGET RNA. This complementary binding is due to the fact that the nucleotide sequence of VGAM340 RNA, herein designated VGAM RNA, is an accurate or a partial inversed-reversed sequence of the nucleotide sequence of each of the host target binding sites. As an illustration, FIG. 1 shows 3 such host target binding sites, designated BINDING SITE I, BINDING SITE II and BINDING SITE III respectively. It is appreciated that the number of host target binding sites shown in FIG. 1 is meant as an illustration only, and is not meant to be limiting VGAM340 RNA, herein designated VGAM RNA, may have a different number of host target binding sites in untranslated regions of a VGAM340 host target RNA, herein designated VGAM HOST TARGET RNA. It is further appreciated that while FIG. 1 depicts host target binding sites in the 3UTR region, this is meant as an example only these host target binding sites may be located in the 3UTR region, the 5UTR region, or in both 3UTR and 5UTR regions.

[4721] The complementary binding of VGAM340 RNA, herein designated VGAM RNA, to host target binding sites on VGAM340 host target RNA, herein designated VGAM HOST TARGET RNA, such as BINDING SITE I, BINDING SITE II and BINDING SITE III, inhibits translation of VGAM340 host target RNA, herein designated VGAM HOST TARGET RNA, into VGAM340 host target protein, herein designated VGAM HOST TARGET PROTEIN. VGAM host target protein is therefore outlined by a broken line.

[4722] It is appreciated that VGAM340 host target gene, herein designated VGAM HOST TARGET GENE, in fact represents a plurality of VGAM340 host target genes. The mRNA of each one of this plurality of VGAM340 host target genes comprises one or more host target binding sites, each having a nucleotide sequence which is at least partly complementary to VGAM340 RNA, herein designated VGAM RNA, and which when bound by VGAM340 RNA, herein designated VGAM RNA, causes inhibition of translation of respective one or more VGAM340 host target proteins.

[4723] It is further appreciated by one skilled in the art that the mode of translational inhibition illustrated by FIG. 1 with specific reference to translational inhibition exerted by VGAM340 gene, herein designated VGAM GENE, on one or more VGAM340 host target gene, herein designated VGAM HOST TARGET GENE, is in fact common to other known non-viral miRNA genes. As mentioned hereinabove with reference to the background section, although a specific complementary binding site has been demonstrated only for some of the known miRNA genes (primarily Lin-4 and Let-7), all other recently discovered miRNA genes are also believed by those skilled in the art to modulate expression of other genes by complementary binding, although specific complementary binding sites of these other miRNA genes have not yet been found (Ruvkun G., Perspective: Glimpses of a tiny RNA world, Science 294, 779 (2001)).

[4724] It is yet further appreciated that a function of VGAM340 is inhibition of expression of host target genes, as part of a novel viral mechanism of attacking a host. Accordingly, utilities of VGAM340 include diagnosis, prevention and treatment of viral infection by Vaccinia virus. Specific functions, and accordingly utilities, of VGAM340 correlate with, and may be deduced from, the identity of the host target genes which VGAM340 binds and inhibits, and the function of these host target genes, as elaborated hereinbelow.

[4725] Nucleotide sequences of the VGAM340 precursor RNA, herein designated VGAM PRECURSOR RNA, and of the diced VGAM340 RNA, herein designated VGAM RNA, and a schematic representation of the secondary folding of VGAM340 folded precursor RNA, herein designated VGAM FOLDED PRECURSOR RNA, of VGAM340 are further described hereinbelow with reference to Table 1.

[4726] Nucleotide sequences of host target binding sites, such as BINDING SITE-I, BINDING SITE-II and BINDING SITE-III of FIG. 1, found on, and schematic representation of the complementarity of each of these host target binding sites to VGAM340 RNA, herein designated VGAM RNA, are described hereinbelow with reference to Table 2.

[4727] FIG. 1 further provides a conceptual description of another novel bioinformatically detected viral gene of the present invention, referred to here as Viral Genomic Address Messenger 341 (VGAM341) viral gene, which modulates expression of respective host target genes thereof, the function and utility of which host target genes is known in the art.

[4728] VGAM341 is a novel bioinformatically detected regulatory, non protein coding, viral micro RNA (miRNA) gene. The method by which VGAM341 was detected is described hereinabove with reference to FIGS. 2-8.

[4729] VGAM341 gene, herein designated VGAM GENE, is a viral gene contained in the genome of Vaccinia virus. VGAM341 host target gene, herein designated VGAM HOST TARGET GENE, is a human gene contained in the human genome.

[4730] VGAM341 gene, herein designated VGAM GENE, encodes a VGAM341 precursor RNA, herein designated VGAM PRECURSOR RNA. Similar to other miRNA genes, and unlike most ordinary genes, VGAM341 precursor RNA, herein designated VGAM PRECURSOR RNA, does not encode a protein. A nucleotide sequence identical or highly similar to the nucleotide sequence of VGAM341 precursor RNA is designated SEQ ID:327, and is provided hereinbelow with reference to the sequence listing part. Nucleotide sequence SEQ ID:327 is located at position 642 relative to the genome of Vaccinia virus.

[4731] VGAM341 precursor RNA, herein designated VGAM PRECURSOR RNA, folds onto itself, forming VGAM341 folded precursor RNA, herein designated VGAM FOLDED PRECURSOR RNA, which has a two-dimensional hairpin structure. As is well known in the art, this hairpin structure, is typical of RNA encoded by miRNA genes, and is due to the fact that the nucleotide sequence of the first half of the RNA encoded by a miRNA gene is an accurate or partial inversed-reversed sequence of the nucleotide sequence of the second half thereof.

[4732] An enzyme complex designated DICER COMPLEX, dices the VGAM341 folded precursor RNA, herein designated VGAM FOLDED PRECURSOR RNA, into VGAM341 RNA, herein designated VGAM RNA, a single stranded ˜22 nt long RNA segment. As is known in the art, dicing of a hairpin structured RNA precursor product into a short ˜22 nt RNA segment is catalyzed by an enzyme complex comprising an enzyme called Dicer together with other necessary proteins. A probable (over 92%) nucleotide sequence of VGAM341 RNA is designated SEQ ID:676, and is provided hereinbelow with reference to the sequence listing part.

[4733] VGAM341 host target gene, herein designated VGAM HOST TARGET GENE, encodes a corresponding messenger RNA, VGAM341 host target RNA, herein designated VGAM HOST TARGET RNA. VGAM341 host target RNA, herein designated VGAM HOST TARGET RNA, comprises three regions, as is typical of mRNA of a protein coding gene: a 5 untranslated region, a protein coding region and a 3 untranslated region, designated 5UTR, PROTEIN CODING and 3UTR respectively.

[4734] VGAM341 RNA, herein designated VGAM RNA, binds complementarily to one or more host target binding sites located in untranslated regions of VGAM341 host target RNA, herein designated VGAM HOST TARGET RNA. This complementary binding is due to the fact that the nucleotide sequence of VGAM341 RNA, herein designated VGAM RNA, is an accurate or a partial inversed-reversed sequence of the nucleotide sequence of each of the host target binding sites. As an illustration, FIG. 1 shows 3 such host target binding sites, designated BINDING SITE I, BINDING SITE II and BINDING SITE III respectively. It is appreciated that the number of host target binding sites shown in FIG. 1 is meant as an illustration only, and is not meant to be limiting VGAM341 RNA, herein designated VGAM RNA, may have a different number of host target binding sites in untranslated regions of a VGAM341 host target RNA, herein designated VGAM HOST TARGET RNA. It is further appreciated that while FIG. 1 depicts host target binding sites in the 3UTR region, this is meant as an example only these host target binding sites may be located in the 3UTR region, the 5UTR region, or in both 3UTR and 5UTR regions.

[4735] The complementary binding of VGAM341 RNA, herein designated VGAM RNA, to host target binding sites on VGAM341 host target RNA, herein designated VGAM HOST TARGET RNA, such as BINDING SITE I, BINDING SITE II and BINDING SITE III, inhibits translation of VGAM341 host target RNA, herein designated VGAM HOST TARGET RNA, into VGAM341 host target protein, herein designated VGAM HOST TARGET PROTEIN. VGAM host target protein is therefore outlined by a broken line.

[4736] It is appreciated that VGAM341 host target gene, herein designated VGAM HOST TARGET GENE, in fact represents a plurality of VGAM341 host target genes. The mRNA of each one of this plurality of VGAM341 host target genes comprises one or more host target binding sites, each having a nucleotide sequence which is at least partly complementary to VGAM341 RNA, herein designated VGAM RNA, and which when bound by VGAM341 RNA, herein designated VGAM RNA, causes inhibition of translation of respective one or more VGAM341 host target proteins.

[4737] It is further appreciated by one skilled in the art that the mode of translational inhibition illustrated by FIG. 1 with specific reference to translational inhibition exerted by VGAM341 gene, herein designated VGAM GENE, on one or more VGAM341 host target gene, herein designated VGAM HOST TARGET GENE, is in fact common to other known non-viral miRNA genes. As mentioned hereinabove with reference to the background section, although a specific complementary binding site has been demonstrated only for some of the known miRNA genes (primarily Lin-4 and Let-7), all other recently discovered miRNA genes are also believed by those skilled in the art to modulate expression of other genes by complementary binding, although specific complementary binding sites of these other miRNA genes have not yet been found (Ruvkun G., Perspective: Glimpses of a tiny RNA world, Science 294, 779 (2001)).

[4738] It is yet further appreciated that a function of VGAM341 is inhibition of expression of host target genes, as part of a novel viral mechanism of attacking a host. Accordingly, utilities of VGAM341 include diagnosis, prevention and treatment of viral infection by Vaccinia virus. Specific functions, and accordingly utilities, of VGAM341 correlate with, and may be deduced from, the identity of the host target genes which VGAM341 binds and inhibits, and the function of these host target genes, as elaborated hereinbelow.

[4739] Nucleotide sequences of the VGAM341 precursor RNA, herein designated VGAM PRECURSOR RNA, and of the diced VGAM341 RNA, herein designated VGAM RNA, and a schematic representation of the secondary folding of VGAM341 folded precursor RNA, herein designated VGAM FOLDED PRECURSOR RNA, of VGAM341 are further described hereinbelow with reference to Table 1.

[4740] Nucleotide sequences of host target binding sites, such as BINDING SITE-I, BINDING SITE-II and BINDING SITE-III of FIG. 1, found on, and schematic representation of the complementarity of each of these host target binding sites to VGAM341 RNA, herein designated VGAM RNA, are described hereinbelow with reference to Table 2.

[4741] FIG. 1 further provides a conceptual description of another novel bioinformatically detected viral gene of the present invention, referred to here as Viral Genomic Address Messenger 342 (VGAM342) viral gene, which modulates expression of respective host target genes thereof, the function and utility of which host target genes is known in the art.

[4742] VGAM342 is a novel bioinformatically detected regulatory, non protein coding, viral micro RNA (miRNA) gene. The method by which VGAM342 was detected is described hereinabove with reference to FIGS. 2-8.

[4743] VGAM342 gene, herein designated VGAM GENE, is a viral gene contained in the genome of Vaccinia virus. VGAM342 host target gene, herein designated VGAM HOST TARGET GENE, is a human gene contained in the human genome.

[4744] VGAM342 gene, herein designated VGAM GENE, encodes a VGAM342 precursor RNA, herein designated VGAM PRECURSOR RNA. Similar to other miRNA genes, and unlike most ordinary genes, VGAM342 precursor RNA, herein designated VGAM PRECURSOR RNA, does not encode a protein. A nucleotide sequence identical or highly similar to the nucleotide sequence of VGAM342 precursor RNA is designated SEQ ID:328, and is provided hereinbelow with reference to the sequence listing part. Nucleotide sequence SEQ ID:328 is located at position 3549 relative to the genome of Vaccinia virus.

[4745] VGAM342 precursor RNA, herein designated VGAM PRECURSOR RNA, folds onto itself, forming VGAM342 folded precursor RNA, herein designated VGAM FOLDED PRECURSOR RNA, which has a two-dimensional hairpin structure. As is well known in the art, this hairpin structure, is typical of RNA encoded by miRNA genes, and is due to the fact that the nucleotide sequence of the first half of the RNA encoded by a miRNA gene is an accurate or partial inversed-reversed sequence of the nucleotide sequence of the second half thereof.

[4746] An enzyme complex designated DICER COMPLEX, dices the VGAM342 folded precursor RNA, herein designated VGAM FOLDED PRECURSOR RNA, into VGAM342 RNA, herein designated VGAM RNA, a single stranded ˜22 nt long RNA segment. As is known in the art, dicing of a hairpin structured RNA precursor product into a short ˜22 nt RNA segment is catalyzed by an enzyme complex comprising an enzyme called Dicer together with other necessary proteins. A probable (over 74%) nucleotide sequence of VGAM342 RNA is designated SEQ ID:677, and is provided hereinbelow with reference to the sequence listing part.

[4747] VGAM342 host target gene, herein designated VGAM HOST TARGET GENE, encodes a corresponding messenger RNA, VGAM342 host target RNA, herein designated VGAM HOST TARGET RNA. VGAM342 host target RNA, herein designated VGAM HOST TARGET RNA, comprises three regions, as is typical of mRNA of a protein coding gene: a 5 untranslated region, a protein coding region and a 3 untranslated region, designated 5UTR, PROTEIN CODING and 3UTR respectively.

[4748] VGAM342 RNA, herein designated VGAM RNA, binds complementarily to one or more host target binding sites located in untranslated regions of VGAM342 host target RNA, herein designated VGAM HOST TARGET RNA. This complementary binding is due to the fact that the nucleotide sequence of VGAM342 RNA, herein designated VGAM RNA, is an accurate or a partial inversed-reversed sequence of the nucleotide sequence of each of the host target binding sites. As an illustration, FIG. 1 shows 3 such host target binding sites, designated BINDING SITE I, BINDING SITE II and BINDING SITE III respectively. It is appreciated that the number of host target binding sites shown in FIG. 1 is meant as an illustration only, and is not meant to be limiting VGAM342 RNA, herein designated VGAM RNA, may have a different number of host target binding sites in untranslated regions of a VGAM342 host target RNA, herein designated VGAM HOST TARGET RNA. It is further appreciated that while FIG. 1 depicts host target binding sites in the 3UTR region, this is meant as an example only these host target binding sites may be located in the 3UTR region, the 5UTR region, or in both 3UTR and 5UTR regions.

[4749] The complementary binding of VGAM342 RNA, herein designated VGAM RNA, to host target binding sites on VGAM342 host target RNA, herein designated VGAM HOST TARGET RNA, such as BINDING SITE I, BINDING SITE II and BINDING SITE III, inhibits translation of VGAM342 host target RNA, herein designated VGAM HOST TARGET RNA, into VGAM342 host target protein, herein designated VGAM HOST TARGET PROTEIN. VGAM host target protein is therefore outlined by a broken line.

[4750] It is appreciated that VGAM342 host target gene, herein designated VGAM HOST TARGET GENE, in fact represents a plurality of VGAM342 host target genes. The mRNA of each one of this plurality of VGAM342 host target genes comprises one or more host target binding sites, each having a nucleotide sequence which is at least partly complementary to VGAM342 RNA, herein designated VGAM RNA, and which when bound by VGAM342 RNA, herein designated VGAM RNA, causes inhibition of translation of respective one or more VGAM342 host target proteins.

[4751] It is further appreciated by one skilled in the art that the mode of translational inhibition illustrated by FIG. 1 with specific reference to translational inhibition exerted by VGAM342 gene, herein designated VGAM GENE, on one or more VGAM342 host target gene, herein designated VGAM HOST TARGET GENE, is in fact common to other known non-viral miRNA genes. As mentioned hereinabove with reference to the background section, although a specific complementary binding site has been demonstrated only for some of the known miRNA genes (primarily Lin-4 and Let-7), all other recently discovered miRNA genes are also believed by those skilled in the art to modulate expression of other genes by complementary binding, although specific complementary binding sites of these other miRNA genes have not yet been found (Ruvkun G., Perspective: Glimpses of a tiny RNA world, Science 294, 779 (2001)).

[4752] It is yet further appreciated that a function of VGAM342 is inhibition of expression of host target genes, as part of a novel viral mechanism of attacking a host. Accordingly, utilities of VGAM342 include diagnosis, prevention and treatment of viral infection by Vaccinia virus. Specific functions, and accordingly utilities, of VGAM342 correlate with, and may be deduced from, the identity of the host target genes which VGAM342 binds and inhibits, and the function of these host target genes, as elaborated hereinbelow.

[4753] Nucleotide sequences of the VGAM342 precursor RNA, herein designated VGAM PRECURSOR RNA, and of the diced VGAM342 RNA, herein designated VGAM RNA, and a schematic representation of the secondary folding of VGAM342 folded precursor RNA, herein designated VGAM FOLDED PRECURSOR RNA, of VGAM342 are further described hereinbelow with reference to Table 1.

[4754] Nucleotide sequences of host target binding sites, such as BINDING SITE-I, BINDING SITE-II and BINDING SITE-III of FIG. 1, found on, and schematic representation of the complementarity of each of these host target binding sites to VGAM342 RNA, herein designated VGAM RNA, are described hereinbelow with reference to Table 2.

[4755] FIG. 1 further provides a conceptual description of another novel bioinformatically detected viral gene of the present invention, referred to here as Viral Genomic Address Messenger 343 (VGAM343) viral gene, which modulates expression of respective host target genes thereof, the function and utility of which host target genes is known in the art.

[4756] VGAM343 is a novel bioinformatically detected regulatory, non protein coding, viral micro RNA (miRNA) gene. The method by which VGAM343 was detected is described hereinabove with reference to FIGS. 2-8.

[4757] VGAM343 gene, herein designated VGAM GENE, is a viral gene contained in the genome of Vaccinia virus. VGAM343 host target gene, herein designated VGAM HOST TARGET GENE, is a human gene contained in the human genome.

[4758] VGAM343 gene, herein designated VGAM GENE, encodes a VGAM343 precursor RNA, herein designated VGAM PRECURSOR RNA. Similar to other miRNA genes, and unlike most ordinary genes, VGAM343 precursor RNA, herein designated VGAM PRECURSOR RNA, does not encode a protein. A nucleotide sequence identical or highly similar to the nucleotide sequence of VGAM343 precursor RNA is designated SEQ ID:329, and is provided hereinbelow with reference to the sequence listing part. Nucleotide sequence SEQ ID:329 is located at position 3549 relative to the genome of Vaccinia virus.

[4759] VGAM343 precursor RNA, herein designated VGAM PRECURSOR RNA, folds onto itself, forming VGAM343 folded precursor RNA, herein designated VGAM FOLDED PRECURSOR RNA, which has a two-dimensional hairpin structure. As is well known in the art, this hairpin structure, is typical of RNA encoded by miRNA genes, and is due to the fact that the nucleotide sequence of the first half of the RNA encoded by a miRNA gene is an accurate or partial inversed-reversed sequence of the nucleotide sequence of the second half thereof.

[4760] An enzyme complex designated DICER COMPLEX, dices the VGAM343 folded precursor RNA, herein designated VGAM FOLDED PRECURSOR RNA, into VGAM343 RNA, herein designated VGAM RNA, a single stranded ˜22 nt long RNA segment. As is known in the art, dicing of a hairpin structured RNA precursor product into a short ˜22 nt RNA segment is catalyzed by an enzyme complex comprising an enzyme called Dicer together with other necessary proteins. A probable (over 74%) nucleotide sequence of VGAM343 RNA is designated SEQ ID:678, and is provided hereinbelow with reference to the sequence listing part.

[4761] VGAM343 host target gene, herein designated VGAM HOST TARGET GENE, encodes a corresponding messenger RNA, VGAM343 host target RNA, herein designated VGAM HOST TARGET RNA. VGAM343 host target RNA, herein designated VGAM HOST TARGET RNA, comprises three regions, as is typical of mRNA of a protein coding gene: a 5 untranslated region, a protein coding region and a 3 untranslated region, designated 5UTR, PROTEIN CODING and 3UTR respectively.

[4762] VGAM343 RNA, herein designated VGAM RNA, binds complementarily to one or more host target binding sites located in untranslated regions of VGAM343 host target RNA, herein designated VGAM HOST TARGET RNA. This complementary binding is due to the fact that the nucleotide sequence of VGAM343 RNA, herein designated VGAM RNA, is an accurate or a partial inversed-reversed sequence of the nucleotide sequence of each of the host target binding sites. As an illustration, FIG. 1 shows 3 such host target binding sites, designated BINDING SITE I, BINDING SITE II and BINDING SITE III respectively. It is appreciated that the number of host target binding sites shown in FIG. 1 is meant as an illustration only, and is not meant to be limiting VGAM343 RNA, herein designated VGAM RNA, may have a different number of host target binding sites in untranslated regions of a VGAM343 host target RNA, herein designated VGAM HOST TARGET RNA. It is further appreciated that while FIG. 1 depicts host target binding sites in the 3UTR region, this is meant as an example only these host target binding sites may be located in the 3UTR region, the 5UTR region, or in both 3UTR and 5UTR regions.

[4763] The complementary binding of VGAM343 RNA, herein designated VGAM RNA, to host target binding sites on VGAM343 host target RNA, herein designated VGAM HOST TARGET RNA, such as BINDING SITE I, BINDING SITE II and BINDING SITE III, inhibits translation of VGAM343 host target RNA, herein designated VGAM HOST TARGET RNA, into VGAM343 host target protein, herein designated VGAM HOST TARGET PROTEIN. VGAM host target protein is therefore outlined by a broken line.

[4764] It is appreciated that VGAM343 host target gene, herein designated VGAM HOST TARGET GENE, in fact represents a plurality of VGAM343 host target genes. The mRNA of each one of this plurality of VGAM343 host target genes comprises one or more host target binding sites, each having a nucleotide sequence which is at least partly complementary to VGAM343 RNA, herein designated VGAM RNA, and which when bound by VGAM343 RNA, herein designated VGAM RNA, causes inhibition of translation of respective one or more VGAM343 host target proteins.

[4765] It is further appreciated by one skilled in the art that the mode of translational inhibition illustrated by FIG. 1 with specific reference to translational inhibition exerted by VGAM343 gene, herein designated VGAM GENE, on one or more VGAM343 host target gene, herein designated VGAM HOST TARGET GENE, is in fact common to other known non-viral miRNA genes. As mentioned hereinabove with reference to the background section, although a specific complementary binding site has been demonstrated only for some of the known miRNA genes (primarily Lin-4 and Let-7), all other recently discovered miRNA genes are also believed by those skilled in the art to modulate expression of other genes by complementary binding, although specific complementary binding sites of these other miRNA genes have not yet been found (Ruvkun G., Perspective: Glimpses of a tiny RNA world, Science 294, 779 (2001)).

[4766] It is yet further appreciated that a function of VGAM343 is inhibition of expression of host target genes, as part of a novel viral mechanism of attacking a host. Accordingly, utilities of VGAM343 include diagnosis, prevention and treatment of viral infection by Vaccinia virus. Specific functions, and accordingly utilities, of VGAM343 correlate with, and may be deduced from, the identity of the host target genes which VGAM343 binds and inhibits, and the function of these host target genes, as elaborated hereinbelow.

[4767] Nucleotide sequences of the VGAM343 precursor RNA, herein designated VGAM PRECURSOR RNA, and of the diced VGAM343 RNA, herein designated VGAM RNA, and a schematic representation of the secondary folding of VGAM343 folded precursor RNA, herein designated VGAM FOLDED PRECURSOR RNA, of VGAM343 are further described hereinbelow with reference to Table 1.

[4768] Nucleotide sequences of host target binding sites, such as BINDING SITE-I, BINDING SITE-II and BINDING SITE-III of FIG. 1, found on, and schematic representation of the complementarity of each of these host target binding sites to VGAM343 RNA, herein designated VGAM RNA, are described hereinbelow with reference to Table 2.

[4769] FIG. 1 further provides a conceptual description of another novel bioinformatically detected viral gene of the present invention, referred to here as Viral Genomic Address Messenger 344 (VGAM344) viral gene, which modulates expression of respective host target genes thereof, the function and utility of which host target genes is known in the art.

[4770] VGAM344 is a novel bioinformatically detected regulatory, non protein coding, viral micro RNA (miRNA) gene. The method by which VGAM344 was detected is described hereinabove with reference to FIGS. 2-8.

[4771] VGAM344 gene, herein designated VGAM GENE, is a viral gene contained in the genome of Vaccinia virus. VGAM344 host target gene, herein designated VGAM HOST TARGET GENE, is a human gene contained in the human genome.

[4772] VGAM344 gene, herein designated VGAM GENE, encodes a VGAM344 precursor RNA, herein designated VGAM PRECURSOR RNA. Similar to other miRNA genes, and unlike most ordinary genes, VGAM344 precursor RNA, herein designated VGAM PRECURSOR RNA, does not encode a protein. A nucleotide sequence identical or highly similar to the nucleotide sequence of VGAM344 precursor RNA is designated SEQ ID:330, and is provided hereinbelow with reference to the sequence listing part. Nucleotide sequence SEQ ID:330 is located at position 2981 relative to the genome of Vaccinia virus.

[4773] VGAM344 precursor RNA, herein designated VGAM PRECURSOR RNA, folds onto itself, forming VGAM344 folded precursor RNA, herein designated VGAM FOLDED PRECURSOR RNA, which has a two-dimensional hairpin structure. As is well known in the art, this hairpin structure, is typical of RNA encoded by miRNA genes, and is due to the fact that the nucleotide sequence of the first half of the RNA encoded by a miRNA gene is an accurate or partial inversed-reversed sequence of the nucleotide sequence of the second half thereof.

[4774] An enzyme complex designated DICER COMPLEX, dices the VGAM344 folded precursor RNA, herein designated VGAM FOLDED PRECURSOR RNA, into VGAM344 RNA, herein designated VGAM RNA, a single stranded ˜22 nt long RNA segment. As is known in the art, dicing of a hairpin structured RNA precursor product into a short ˜22 nt RNA segment is catalyzed by an enzyme complex comprising an enzyme called Dicer together with other necessary proteins. A probable (over 79%) nucleotide sequence of VGAM344 RNA is designated SEQ ID:679, and is provided hereinbelow with reference to the sequence listing part.

[4775] VGAM344 host target gene, herein designated VGAM HOST TARGET GENE, encodes a corresponding messenger RNA, VGAM344 host target RNA, herein designated VGAM HOST TARGET RNA. VGAM344 host target RNA, herein designated VGAM HOST TARGET RNA, comprises three regions, as is typical of mRNA of a protein coding gene: a 5 untranslated region, a protein coding region and a 3 untranslated region, designated 5UTR, PROTEIN CODING and 3UTR respectively.

[4776] VGAM344 RNA, herein designated VGAM RNA, binds complementarily to one or more host target binding sites located in untranslated regions of VGAM344 host target RNA, herein designated VGAM HOST TARGET RNA. This complementary binding is due to the fact that the nucleotide sequence of VGAM344 RNA, herein designated VGAM RNA, is an accurate or a partial inversed-reversed sequence of the nucleotide sequence of each of the host target binding sites. As an illustration, FIG. 1 shows 3 such host target binding sites, designated BINDING SITE I, BINDING SITE II and BINDING SITE III respectively. It is appreciated that the number of host target binding sites shown in FIG. 1 is meant as an illustration only, and is not meant to be limiting VGAM344 RNA, herein designated VGAM RNA, may have a different number of host target binding sites in untranslated regions of a VGAM344 host target RNA, herein designated VGAM HOST TARGET RNA. It is further appreciated that while FIG. 1 depicts host target binding sites in the 3UTR region, this is meant as an example only these host target binding sites may be located in the 3UTR region, the 5UTR region, or in both 3UTR and 5UTR regions.

[4777] The complementary binding of VGAM344 RNA, herein designated VGAM RNA, to host target binding sites on VGAM344 host target RNA, herein designated VGAM HOST TARGET RNA, such as BINDING SITE I, BINDING SITE II and BINDING SITE III, inhibits translation of VGAM344 host target RNA, herein designated VGAM HOST TARGET RNA, into VGAM344 host target protein, herein designated VGAM HOST TARGET PROTEIN. VGAM host target protein is therefore outlined by a broken line.

[4778] It is appreciated that VGAM344 host target gene, herein designated VGAM HOST TARGET GENE, in fact represents a plurality of VGAM344 host target genes. The mRNA of each one of this plurality of VGAM344 host target genes comprises one or more host target binding sites, each having a nucleotide sequence which is at least partly complementary to VGAM344 RNA, herein designated VGAM RNA, and which when bound by VGAM344 RNA, herein designated VGAM RNA, causes inhibition of translation of respective one or more VGAM344 host target proteins.

[4779] It is further appreciated by one skilled in the art that the mode of translational inhibition illustrated by FIG. 1 with specific reference to translational inhibition exerted by VGAM344 gene, herein designated VGAM GENE, on one or more VGAM344 host target gene, herein designated VGAM HOST TARGET GENE, is in fact common to other known non-viral miRNA genes. As mentioned hereinabove with reference to the background section, although a specific complementary binding site has been demonstrated only for some of the known miRNA genes (primarily Lin-4 and Let-7), all other recently discovered miRNA genes are also believed by those skilled in the art to modulate expression of other genes by complementary binding, although specific complementary binding sites of these other miRNA genes have not yet been found (Ruvkun G., Perspective: Glimpses of a tiny RNA world, Science 294, 779 (2001)).

[4780] It is yet further appreciated that a function of VGAM344 is inhibition of expression of host target genes, as part of a novel viral mechanism of attacking a host. Accordingly, utilities of VGAM344 include diagnosis, prevention and treatment of viral infection by Vaccinia virus. Specific functions, and accordingly utilities, of VGAM344 correlate with, and may be deduced from, the identity of the host target genes which VGAM344 binds and inhibits, and the function of these host target genes, as elaborated hereinbelow.

[4781] Nucleotide sequences of the VGAM344 precursor RNA, herein designated VGAM PRECURSOR RNA, and of the diced VGAM344 RNA, herein designated VGAM RNA, and a schematic representation of the secondary folding of VGAM344 folded precursor RNA, herein designated VGAM FOLDED PRECURSOR RNA, of VGAM344 are further described hereinbelow with reference to Table 1.

[4782] Nucleotide sequences of host target binding sites, such as BINDING SITE-I, BINDING SITE-II and BINDING SITE-III of FIG. 1, found on, and schematic representation of the complementarity of each of these host target binding sites to VGAM344 RNA, herein designated VGAM RNA, are described hereinbelow with reference to Table 2.

[4783] FIG. 1 further provides a conceptual description of another novel bioinformatically detected viral gene of the present invention, referred to here as Viral Genomic Address Messenger 345 (VGAM345) viral gene, which modulates expression of respective host target genes thereof, the function and utility of which host target genes is known in the art.

[4784] VGAM345 is a novel bioinformatically detected regulatory, non protein coding, viral micro RNA (miRNA) gene. The method by which VGAM345 was detected is described hereinabove with reference to FIGS. 2-8.

[4785] VGAM345 gene, herein designated VGAM GENE, is a viral gene contained in the genome of Vaccinia virus. VGAM345 host target gene, herein designated VGAM HOST TARGET GENE, is a human gene contained in the human genome.

[4786] VGAM345 gene, herein designated VGAM GENE, encodes a VGAM345 precursor RNA, herein designated VGAM PRECURSOR RNA. Similar to other miRNA genes, and unlike most ordinary genes, VGAM345 precursor RNA, herein designated VGAM PRECURSOR RNA, does not encode a protein. A nucleotide sequence identical or highly similar to the nucleotide sequence of VGAM345 precursor RNA is designated SEQ ID:331, and is provided hereinbelow with reference to the sequence listing part. Nucleotide sequence SEQ ID:331 is located at position 963 relative to the genome of Vaccinia virus.

[4787] VGAM345 precursor RNA, herein designated VGAM PRECURSOR RNA, folds onto itself, forming VGAM345 folded precursor RNA, herein designated VGAM FOLDED PRECURSOR RNA, which has a two-dimensional hairpin structure. As is well known in the art, this hairpin structure, is typical of RNA encoded by miRNA genes, and is due to the fact that the nucleotide sequence of the first half of the RNA encoded by a miRNA gene is an accurate or partial inversed-reversed sequence of the nucleotide sequence of the second half thereof.

[4788] An enzyme complex designated DICER COMPLEX, dices the VGAM345 folded precursor RNA, herein designated VGAM FOLDED PRECURSOR RNA, into VGAM345 RNA, herein designated VGAM RNA, a single stranded ˜22 nt long RNA segment. As is known in the art, dicing of a hairpin structured RNA precursor product into a short ˜22 nt RNA segment is catalyzed by an enzyme complex comprising an enzyme called Dicer together with other necessary proteins. A probable (over 92%) nucleotide sequence of VGAM345 RNA is designated SEQ ID:680, and is provided hereinbelow with reference to the sequence listing part.

[4789] VGAM345 host target gene, herein designated VGAM HOST TARGET GENE, encodes a corresponding messenger RNA, VGAM345 host target RNA, herein designated VGAM HOST TARGET RNA. VGAM345 host target RNA, herein designated VGAM HOST TARGET RNA, comprises three regions, as is typical of mRNA of a protein coding gene: a 5 untranslated region, a protein coding region and a 3 untranslated region, designated 5UTR, PROTEIN CODING and 3UTR respectively.

[4790] VGAM345 RNA, herein designated VGAM RNA, binds complementarily to one or more host target binding sites located in untranslated regions of VGAM345 host target RNA, herein designated VGAM HOST TARGET RNA. This complementary binding is due to the fact that the nucleotide sequence of VGAM345 RNA, herein designated VGAM RNA, is an accurate or a partial inversed-reversed sequence of the nucleotide sequence of each of the host target binding sites. As an illustration, FIG. 1 shows 3 such host target binding sites, designated BINDING SITE I, BINDING SITE II and BINDING SITE III respectively. It is appreciated that the number of host target binding sites shown in FIG. 1 is meant as an illustration only, and is not meant to be limiting VGAM345 RNA, herein designated VGAM RNA, may have a different number of host target binding sites in untranslated regions of a VGAM345 host target RNA, herein designated VGAM HOST TARGET RNA. It is further appreciated that while FIG. 1 depicts host target binding sites in the 3UTR region, this is meant as an example only these host target binding sites may be located in the 3UTR region, the 5UTR region, or in both 3UTR and 5UTR regions.

[4791] The complementary binding of VGAM345 RNA, herein designated VGAM RNA, to host target binding sites on VGAM345 host target RNA, herein designated VGAM HOST TARGET RNA, such as BINDING SITE I, BINDING SITE II and BINDING SITE III, inhibits translation of VGAM345 host target RNA, herein designated VGAM HOST TARGET RNA, into VGAM345 host target protein, herein designated VGAM HOST TARGET PROTEIN. VGAM host target protein is therefore outlined by a broken line.

[4792] It is appreciated that VGAM345 host target gene, herein designated VGAM HOST TARGET GENE, in fact represents a plurality of VGAM345 host target genes. The mRNA of each one of this plurality of VGAM345 host target genes comprises one or more host target binding sites, each having a nucleotide sequence which is at least partly complementary to VGAM345 RNA, herein designated VGAM RNA, and which when bound by VGAM345 RNA, herein designated VGAM RNA, causes inhibition of translation of respective one or more VGAM345 host target proteins.

[4793] It is further appreciated by one skilled in the art that the mode of translational inhibition illustrated by FIG. 1 with specific reference to translational inhibition exerted by VGAM345 gene, herein designated VGAM GENE, on one or more VGAM345 host target gene, herein designated VGAM HOST TARGET GENE, is in fact common to other known non-viral miRNA genes. As mentioned hereinabove with reference to the background section, although a specific complementary binding site has been demonstrated only for some of the known miRNA genes (primarily Lin-4 and Let-7), all other recently discovered miRNA genes are also believed by those skilled in the art to modulate expression of other genes by complementary binding, although specific complementary binding sites of these other miRNA genes have not yet been found (Ruvkun G., Perspective: Glimpses of a tiny RNA world, Science 294, 779 (2001)).

[4794] It is yet further appreciated that a function of VGAM345 is inhibition of expression of host target genes, as part of a novel viral mechanism of attacking a host. Accordingly, utilities of VGAM345 include diagnosis, prevention and treatment of viral infection by Vaccinia virus. Specific functions, and accordingly utilities, of VGAM345 correlate with, and may be deduced from, the identity of the host target genes which VGAM345 binds and inhibits, and the function of these host target genes, as elaborated hereinbelow.

[4795] Nucleotide sequences of the VGAM345 precursor RNA, herein designated VGAM PRECURSOR RNA, and of the diced VGAM345 RNA, herein designated VGAM RNA, and a schematic representation of the secondary folding of VGAM345 folded precursor RNA, herein designated VGAM FOLDED PRECURSOR RNA, of VGAM345 are further described hereinbelow with reference to Table 1.

[4796] Nucleotide sequences of host target binding sites, such as BINDING SITE-I, BINDING SITE-II and BINDING SITE-III of FIG. 1, found on, and schematic representation of the complementarity of each of these host target binding sites to VGAM345 RNA, herein designated VGAM RNA, are described hereinbelow with reference to Table 2.

[4797] FIG. 1 further provides a conceptual description of another novel bioinformatically detected viral gene of the present invention, referred to here as Viral Genomic Address Messenger 346 (VGAM346) viral gene, which modulates expression of respective host target genes thereof, the function and utility of which host target genes is known in the art.

[4798] VGAM346 is a novel bioinformatically detected regulatory, non protein coding, viral micro RNA (miRNA) gene. The method by which VGAM346 was detected is described hereinabove with reference to FIGS. 2-8.

[4799] VGAM346 gene, herein designated VGAM GENE, is a viral gene contained in the genome of Vaccinia virus. VGAM346 host target gene, herein designated VGAM HOST TARGET GENE, is a human gene contained in the human genome.

[4800] VGAM346 gene, herein designated VGAM GENE, encodes a VGAM346 precursor RNA, herein designated VGAM PRECURSOR RNA. Similar to other miRNA genes, and unlike most ordinary genes, VGAM346 precursor RNA, herein designated VGAM PRECURSOR RNA, does not encode a protein. A nucleotide sequence identical or highly similar to the nucleotide sequence of VGAM346 precursor RNA is designated SEQ ID:332, and is provided hereinbelow with reference to the sequence listing part. Nucleotide sequence SEQ ID:332 is located at position 963 relative to the genome of Vaccinia virus.

[4801] VGAM346 precursor RNA, herein designated VGAM PRECURSOR RNA, folds onto itself, forming VGAM346 folded precursor RNA, herein designated VGAM FOLDED PRECURSOR RNA, which has a two-dimensional hairpin structure. As is well known in the art, this hairpin structure, is typical of RNA encoded by miRNA genes, and is due to the fact that the nucleotide sequence of the first half of the RNA encoded by a miRNA gene is an accurate or partial inversed-reversed sequence of the nucleotide sequence of the second half thereof.

[4802] An enzyme complex designated DICER COMPLEX, dices the VGAM346 folded precursor RNA, herein designated VGAM FOLDED PRECURSOR RNA, into VGAM346 RNA, herein designated VGAM RNA, a single stranded ˜22 nt long RNA segment. As is known in the art, dicing of a hairpin structured RNA precursor product into a short ˜22 nt RNA segment is catalyzed by an enzyme complex comprising an enzyme called Dicer together with other necessary proteins. A probable (over 92%) nucleotide sequence of VGAM346 RNA is designated SEQ ID:681, and is provided hereinbelow with reference to the sequence listing part.

[4803] VGAM346 host target gene, herein designated VGAM HOST TARGET GENE, encodes a corresponding messenger RNA, VGAM346 host target RNA, herein designated VGAM HOST TARGET RNA. VGAM346 host target RNA, herein designated VGAM HOST TARGET RNA, comprises three regions, as is typical of mRNA of a protein coding gene: a 5 untranslated region, a protein coding region and a 3 untranslated region, designated 5UTR, PROTEIN CODING and 3UTR respectively.

[4804] VGAM346 RNA, herein designated VGAM RNA, binds complementarily to one or more host target binding sites located in untranslated regions of VGAM346 host target RNA, herein designated VGAM HOST TARGET RNA. This complementary binding is due to the fact that the nucleotide sequence of VGAM346 RNA, herein designated VGAM RNA, is an accurate or a partial inversed-reversed sequence of the nucleotide sequence of each of the host target binding sites. As an illustration, FIG. 1 shows 3 such host target binding sites, designated BINDING SITE I, BINDING SITE II and BINDING SITE III respectively. It is appreciated that the number of host target binding sites shown in FIG. 1 is meant as an illustration only, and is not meant to be limiting VGAM346 RNA, herein designated VGAM RNA, may have a different number of host target binding sites in untranslated regions of a VGAM346 host target RNA, herein designated VGAM HOST TARGET RNA. It is further appreciated that while FIG. 1 depicts host target binding sites in the 3UTR region, this is meant as an example only these host target binding sites may be located in the 3UTR region, the 5UTR region, or in both 3UTR and 5UTR regions.

[4805] The complementary binding of VGAM346 RNA, herein designated VGAM RNA, to host target binding sites on VGAM346 host target RNA, herein designated VGAM HOST TARGET RNA, such as BINDING SITE I, BINDING SITE II and BINDING SITE III, inhibits translation of VGAM346 host target RNA, herein designated VGAM HOST TARGET RNA, into VGAM346 host target protein, herein designated VGAM HOST TARGET PROTEIN. VGAM host target protein is therefore outlined by a broken line.

[4806] It is appreciated that VGAM346 host target gene, herein designated VGAM HOST TARGET GENE, in fact represents a plurality of VGAM346 host target genes. The mRNA of each one of this plurality of VGAM346 host target genes comprises one or more host target binding sites, each having a nucleotide sequence which is at least partly complementary to VGAM346 RNA, herein designated VGAM RNA, and which when bound by VGAM346 RNA, herein designated VGAM RNA, causes inhibition of translation of respective one or more VGAM346 host target proteins.

[4807] It is further appreciated by one skilled in the art that the mode of translational inhibition illustrated by FIG. 1 with specific reference to translational inhibition exerted by VGAM346 gene, herein designated VGAM GENE, on one or more VGAM346 host target gene, herein designated VGAM HOST TARGET GENE, is in fact common to other known non-viral miRNA genes. As mentioned hereinabove with reference to the background section, although a specific complementary binding site has been demonstrated only for some of the known miRNA genes (primarily Lin-4 and Let-7), all other recently discovered miRNA genes are also believed by those skilled in the art to modulate expression of other genes by complementary binding, although specific complementary binding sites of these other miRNA genes have not yet been found (Ruvkun G., Perspective: Glimpses of a tiny RNA world, Science 294, 779 (2001)).

[4808] It is yet further appreciated that a function of VGAM346 is inhibition of expression of host target genes, as part of a novel viral mechanism of attacking a host. Accordingly, utilities of VGAM346 include diagnosis, prevention and treatment of viral infection by Vaccinia virus. Specific functions, and accordingly utilities, of VGAM346 correlate with, and may be deduced from, the identity of the host target genes which VGAM346 binds and inhibits, and the function of these host target genes, as elaborated hereinbelow.

[4809] Nucleotide sequences of the VGAM346 precursor RNA, herein designated VGAM PRECURSOR RNA, and of the diced VGAM346 RNA, herein designated VGAM RNA, and a schematic representation of the secondary folding of VGAM346 folded precursor RNA, herein designated VGAM FOLDED PRECURSOR RNA, of VGAM346 are further described hereinbelow with reference to Table 1.

[4810] Nucleotide sequences of host target binding sites, such as BINDING SITE-I, BINDING SITE-II and BINDING SITE-III of FIG. 1, found on, and schematic representation of the complementarity of each of these host target binding sites to VGAM346 RNA, herein designated VGAM RNA, are described hereinbelow with reference to Table 2.

[4811] FIG. 1 further provides a conceptual description of another novel bioinformatically detected viral gene of the present invention, referred to here as Viral Genomic Address Messenger 347 (VGAM347) viral gene, which modulates expression of respective host target genes thereof, the function and utility of which host target genes is known in the art.

[4812] VGAM347 is a novel bioinformatically detected regulatory, non protein coding, viral micro RNA (miRNA) gene. The method by which VGAM347 was detected is described hereinabove with reference to FIGS. 2-8.

[4813] VGAM347 gene, herein designated VGAM GENE, is a viral gene contained in the genome of Vaccinia virus. VGAM347 host target gene, herein designated VGAM HOST TARGET GENE, is a human gene contained in the human genome.

[4814] VGAM347 gene, herein designated VGAM GENE, encodes a VGAM347 precursor RNA, herein designated VGAM PRECURSOR RNA. Similar to other miRNA genes, and unlike most ordinary genes, VGAM347 precursor RNA, herein designated VGAM PRECURSOR RNA, does not encode a protein. A nucleotide sequence identical or highly similar to the nucleotide sequence of VGAM347 precursor RNA is designated SEQ ID:333, and is provided hereinbelow with reference to the sequence listing part. Nucleotide sequence SEQ ID:333 is located at position 963 relative to the genome of Vaccinia virus.

[4815] VGAM347 precursor RNA, herein designated VGAM PRECURSOR RNA, folds onto itself, forming VGAM347 folded precursor RNA, herein designated VGAM FOLDED PRECURSOR RNA, which has a two-dimensional hairpin structure. As is well known in the art, this hairpin structure, is typical of RNA encoded by miRNA genes, and is due to the fact that the nucleotide sequence of the first half of the RNA encoded by a miRNA gene is an accurate or partial inversed-reversed sequence of the nucleotide sequence of the second half thereof.

[4816] An enzyme complex designated DICER COMPLEX, dices the VGAM347 folded precursor RNA, herein designated VGAM FOLDED PRECURSOR RNA, into VGAM347 RNA, herein designated VGAM RNA, a single stranded ˜22 nt long RNA segment. As is known in the art, dicing of a hairpin structured RNA precursor product into a short ˜22 nt RNA segment is catalyzed by an enzyme complex comprising an enzyme called Dicer together with other necessary proteins. A probable (over 92%) nucleotide sequence of VGAM347 RNA is designated SEQ ID:682, and is provided hereinbelow with reference to the sequence listing part.

[4817] VGAM347 host target gene, herein designated VGAM HOST TARGET GENE, encodes a corresponding messenger RNA, VGAM347 host target RNA, herein designated VGAM HOST TARGET RNA. VGAM347 host target RNA, herein designated VGAM HOST TARGET RNA, comprises three regions, as is typical of mRNA of a protein coding gene: a 5 untranslated region, a protein coding region and a 3 untranslated region, designated 5UTR, PROTEIN CODING and 3UTR respectively.

[4818] VGAM347 RNA, herein designated VGAM RNA, binds complementarily to one or more host target binding sites located in untranslated regions of VGAM347 host target RNA, herein designated VGAM HOST TARGET RNA. This complementary binding is due to the fact that the nucleotide sequence of VGAM347 RNA, herein designated VGAM RNA, is an accurate or a partial inversed-reversed sequence of the nucleotide sequence of each of the host target binding sites. As an illustration, FIG. 1 shows 3 such host target binding sites, designated BINDING SITE I, BINDING SITE II and BINDING SITE III respectively. It is appreciated that the number of host target binding sites shown in FIG. 1 is meant as an illustration only, and is not meant to be limiting VGAM347 RNA, herein designated VGAM RNA, may have a different number of host target binding sites in untranslated regions of a VGAM347 host target RNA, herein designated VGAM HOST TARGET RNA. It is further appreciated that while FIG. 1 depicts host target binding sites in the 3UTR region, this is meant as an example only these host target binding sites may be located in the 3UTR region, the 5UTR region, or in both 3UTR and 5UTR regions.

[4819] The complementary binding of VGAM347 RNA, herein designated VGAM RNA, to host target binding sites on VGAM347 host target RNA, herein designated VGAM HOST TARGET RNA, such as BINDING SITE I, BINDING SITE II and BINDING SITE III, inhibits translation of VGAM347 host target RNA, herein designated VGAM HOST TARGET RNA, into VGAM347 host target protein, herein designated VGAM HOST TARGET PROTEIN. VGAM host target protein is therefore outlined by a broken line.

[4820] It is appreciated that VGAM347 host target gene, herein designated VGAM HOST TARGET GENE, in fact represents a plurality of VGAM347 host target genes. The mRNA of each one of this plurality of VGAM347 host target genes comprises one or more host target binding sites, each having a nucleotide sequence which is at least partly complementary to VGAM347 RNA, herein designated VGAM RNA, and which when bound by VGAM347 RNA, herein designated VGAM RNA, causes inhibition of translation of respective one or more VGAM347 host target proteins.

[4821] It is further appreciated by one skilled in the art that the mode of translational inhibition illustrated by FIG. 1 with specific reference to translational inhibition exerted by VGAM347 gene, herein designated VGAM GENE, on one or more VGAM347 host target gene, herein designated VGAM HOST TARGET GENE, is in fact common to other known non-viral miRNA genes. As mentioned hereinabove with reference to the background section, although a specific complementary binding site has been demonstrated only for some of the known miRNA genes (primarily Lin-4 and Let-7), all other recently discovered miRNA genes are also believed by those skilled in the art to modulate expression of other genes by complementary binding, although specific complementary binding sites of these other miRNA genes have not yet been found (Ruvkun G., Perspective: Glimpses of a tiny RNA world, Science 294, 779 (2001)).

[4822] It is yet further appreciated that a function of VGAM347 is inhibition of expression of host target genes, as part of a novel viral mechanism of attacking a host. Accordingly, utilities of VGAM347 include diagnosis, prevention and treatment of viral infection by Vaccinia virus. Specific functions, and accordingly utilities, of VGAM347 correlate with, and may be deduced from, the identity of the host target genes which VGAM347 binds and inhibits, and the function of these host target genes, as elaborated hereinbelow.

[4823] Nucleotide sequences of the VGAM347 precursor RNA, herein designated VGAM PRECURSOR RNA, and of the diced VGAM347 RNA, herein designated VGAM RNA, and a schematic representation of the secondary folding of VGAM347 folded precursor RNA, herein designated VGAM FOLDED PRECURSOR RNA, of VGAM347 are further described hereinbelow with reference to Table 1.

[4824] Nucleotide sequences of host target binding sites, such as BINDING SITE-I, BINDING SITE-II and BINDING SITE-III of FIG. 1, found on, and schematic representation of the complementarity of each of these host target binding sites to VGAM347 RNA, herein designated VGAM RNA, are described hereinbelow with reference to Table 2.

[4825] FIG. 1 further provides a conceptual description of another novel bioinformatically detected viral gene of the present invention, referred to here as Viral Genomic Address Messenger 348 (VGAM348) viral gene, which modulates expression of respective host target genes thereof, the function and utility of which host target genes is known in the art.

[4826] VGAM348 is a novel bioinformatically detected regulatory, non protein coding, viral micro RNA (miRNA) gene. The method by which VGAM348 was detected is described hereinabove with reference to FIGS. 2-8.

[4827] VGAM348 gene, herein designated VGAM GENE, is a viral gene contained in the genome of Vaccinia virus. VGAM348 host target gene, herein designated VGAM HOST TARGET GENE, is a human gene contained in the human genome.

[4828] VGAM348 gene, herein designated VGAM GENE, encodes a VGAM348 precursor RNA, herein designated VGAM PRECURSOR RNA. Similar to other miRNA genes, and unlike most ordinary genes, VGAM348 precursor RNA, herein designated VGAM PRECURSOR RNA, does not encode a protein. A nucleotide sequence identical or highly similar to the nucleotide sequence of VGAM348 precursor RNA is designated SEQ ID:334, and is provided hereinbelow with reference to the sequence listing part. Nucleotide sequence SEQ ID:334 is located at position 963 relative to the genome of Vaccinia virus.

[4829] VGAM348 precursor RNA, herein designated VGAM PRECURSOR RNA, folds onto itself, forming VGAM348 folded precursor RNA, herein designated VGAM FOLDED PRECURSOR RNA, which has a two-dimensional hairpin structure. As is well known in the art, this hairpin structure, is typical of RNA encoded by miRNA genes, and is due to the fact that the nucleotide sequence of the first half of the RNA encoded by a miRNA gene is an accurate or partial inversed-reversed sequence of the nucleotide sequence of the second half thereof.

[4830] An enzyme complex designated DICER COMPLEX, dices the VGAM348 folded precursor RNA, herein designated VGAM FOLDED PRECURSOR RNA, into VGAM348 RNA, herein designated VGAM RNA, a single stranded ˜22 nt long RNA segment. As is known in the art, dicing of a hairpin structured RNA precursor product into a short ˜22 nt RNA segment is catalyzed by an enzyme complex comprising an enzyme called Dicer together with other necessary proteins. A probable (over 92%) nucleotide sequence of VGAM348 RNA is designated SEQ ID:683, and is provided hereinbelow with reference to the sequence listing part.

[4831] VGAM348 host target gene, herein designated VGAM HOST TARGET GENE, encodes a corresponding messenger RNA, VGAM348 host target RNA, herein designated VGAM HOST TARGET RNA. VGAM348 host target RNA, herein designated VGAM HOST TARGET RNA, comprises three regions, as is typical of mRNA of a protein coding gene: a 5 untranslated region, a protein coding region and a 3 untranslated region, designated 5UTR, PROTEIN CODING and 3UTR respectively.

[4832] VGAM348 RNA, herein designated VGAM RNA, binds complementarily to one or more host target binding sites located in untranslated regions of VGAM348 host target RNA, herein designated VGAM HOST TARGET RNA. This complementary binding is due to the fact that the nucleotide sequence of VGAM348 RNA, herein designated VGAM RNA, is an accurate or a partial inversed-reversed sequence of the nucleotide sequence of each of the host target binding sites. As an illustration, FIG. 1 shows 3 such host target binding sites, designated BINDING SITE I, BINDING SITE II and BINDING SITE III respectively. It is appreciated that the number of host target binding sites shown in FIG. 1 is meant as an illustration only, and is not meant to be limiting VGAM348 RNA, herein designated VGAM RNA, may have a different number of host target binding sites in untranslated regions of a VGAM348 host target RNA, herein designated VGAM HOST TARGET RNA. It is further appreciated that while FIG. 1 depicts host target binding sites in the 3UTR region, this is meant as an example only these host target binding sites may be located in the 3UTR region, the 5UTR region, or in both 3UTR and 5UTR regions.

[4833] The complementary binding of VGAM348 RNA, herein designated VGAM RNA, to host target binding sites on VGAM348 host target RNA, herein designated VGAM HOST TARGET RNA, such as BINDING SITE I, BINDING SITE II and BINDING SITE III, inhibits translation of VGAM348 host target RNA, herein designated VGAM HOST TARGET RNA, into VGAM348 host target protein, herein designated VGAM HOST TARGET PROTEIN. VGAM host target protein is therefore outlined by a broken line.

[4834] It is appreciated that VGAM348 host target gene, herein designated VGAM HOST TARGET GENE, in fact represents a plurality of VGAM348 host target genes. The mRNA of each one of this plurality of VGAM348 host target genes comprises one or more host target binding sites, each having a nucleotide sequence which is at least partly complementary to VGAM348 RNA, herein designated VGAM RNA, and which when bound by VGAM348 RNA, herein designated VGAM RNA, causes inhibition of translation of respective one or more VGAM348 host target proteins.

[4835] It is further appreciated by one skilled in the art that the mode of translational inhibition illustrated by FIG. 1 with specific reference to translational inhibition exerted by VGAM348 gene, herein designated VGAM GENE, on one or more VGAM348 host target gene, herein designated VGAM HOST TARGET GENE, is in fact common to other known non-viral miRNA genes. As mentioned hereinabove with reference to the background section, although a specific complementary binding site has been demonstrated only for some of the known miRNA genes (primarily Lin-4 and Let-7), all other recently discovered miRNA genes are also believed by those skilled in the art to modulate expression of other genes by complementary binding, although specific complementary binding sites of these other miRNA genes have not yet been found (Ruvkun G., Perspective: Glimpses of a tiny RNA world, Science 294, 779 (2001)).

[4836] It is yet further appreciated that a function of VGAM348 is inhibition of expression of host target genes, as part of a novel viral mechanism of attacking a host. Accordingly, utilities of VGAM348 include diagnosis, prevention and treatment of viral infection by Vaccinia virus. Specific functions, and accordingly utilities, of VGAM348 correlate with, and may be deduced from, the identity of the host target genes which VGAM348 binds and inhibits, and the function of these host target genes, as elaborated hereinbelow.

[4837] Nucleotide sequences of the VGAM348 precursor RNA, herein designated VGAM PRECURSOR RNA, and of the diced VGAM348 RNA, herein designated VGAM RNA, and a schematic representation of the secondary folding of VGAM348 folded precursor RNA, herein designated VGAM FOLDED PRECURSOR RNA, of VGAM348 are further described hereinbelow with reference to Table 1.

[4838] Nucleotide sequences of host target binding sites, such as BINDING SITE-I, BINDING SITE-II and BINDING SITE-III of FIG. 1, found on, and schematic representation of the complementarity of each of these host target binding sites to VGAM348 RNA, herein designated VGAM RNA, are described hereinbelow with reference to Table 2.

[4839] FIG. 1 further provides a conceptual description of another novel bioinformatically detected viral gene of the present invention, referred to here as Viral Genomic Address Messenger 349 (VGAM349) viral gene, which modulates expression of respective host target genes thereof, the function and utility of which host target genes is known in the art.

[4840] VGAM349 is a novel bioinformatically detected regulatory, non protein coding, viral micro RNA (miRNA) gene. The method by which VGAM349 was detected is described hereinabove with reference to FIGS. 2-8.

[4841] VGAM349 gene, herein designated VGAM GENE, is a viral gene contained in the genome of Vaccinia virus. VGAM349 host target gene, herein designated VGAM HOST TARGET GENE, is a human gene contained in the human genome.

[4842] VGAM349 gene, herein designated VGAM GENE, encodes a VGAM349 precursor RNA, herein designated VGAM PRECURSOR RNA. Similar to other miRNA genes, and unlike most ordinary genes, VGAM349 precursor RNA, herein designated VGAM PRECURSOR RNA, does not encode a protein. A nucleotide sequence identical or highly similar to the nucleotide sequence of VGAM349 precursor RNA is designated SEQ ID:335, and is provided hereinbelow with reference to the sequence listing part. Nucleotide sequence SEQ ID:335 is located at position 963 relative to the genome of Vaccinia virus.

[4843] VGAM349 precursor RNA, herein designated VGAM PRECURSOR RNA, folds onto itself, forming VGAM349 folded precursor RNA, herein designated VGAM FOLDED PRECURSOR RNA, which has a two-dimensional hairpin structure. As is well known in the art, this hairpin structure, is typical of RNA encoded by miRNA genes, and is due to the fact that the nucleotide sequence of the first half of the RNA encoded by a miRNA gene is an accurate or partial inversed-reversed sequence of the nucleotide sequence of the second half thereof.

[4844] An enzyme complex designated DICER COMPLEX, dices the VGAM349 folded precursor RNA, herein designated VGAM FOLDED PRECURSOR RNA, into VGAM349 RNA, herein designated VGAM RNA, a single stranded ˜22 nt long RNA segment. As is known in the art, dicing of a hairpin structured RNA precursor product into a short ˜22 nt RNA segment is catalyzed by an enzyme complex comprising an enzyme called Dicer together with other necessary proteins. A probable (over 92%) nucleotide sequence of VGAM349 RNA is designated SEQ ID:684, and is provided hereinbelow with reference to the sequence listing part.

[4845] VGAM349 host target gene, herein designated VGAM HOST TARGET GENE, encodes a corresponding messenger RNA, VGAM349 host target RNA, herein designated VGAM HOST TARGET RNA. VGAM349 host target RNA, herein designated VGAM HOST TARGET RNA, comprises three regions, as is typical of mRNA of a protein coding gene: a 5 untranslated region, a protein coding region and a 3 untranslated region, designated 5UTR, PROTEIN CODING and 3UTR respectively.

[4846] VGAM349 RNA, herein designated VGAM RNA, binds complementarily to one or more host target binding sites located in untranslated regions of VGAM349 host target RNA, herein designated VGAM HOST TARGET RNA. This complementary binding is due to the fact that the nucleotide sequence of VGAM349 RNA, herein designated VGAM RNA, is an accurate or a partial inversed-reversed sequence of the nucleotide sequence of each of the host target binding sites. As an illustration, FIG. 1 shows 3 such host target binding sites, designated BINDING SITE I, BINDING SITE II and BINDING SITE III respectively. It is appreciated that the number of host target binding sites shown in FIG. 1 is meant as an illustration only, and is not meant to be limiting VGAM349 RNA, herein designated VGAM RNA, may have a different number of host target binding sites in untranslated regions of a VGAM349 host target RNA, herein designated VGAM HOST TARGET RNA. It is further appreciated that while FIG. 1 depicts host target binding sites in the 3UTR region, this is meant as an example only these host target binding sites may be located in the 3UTR region, the 5UTR region, or in both 3UTR and 5UTR regions.

[4847] The complementary binding of VGAM349 RNA, herein designated VGAM RNA, to host target binding sites on VGAM349 host target RNA, herein designated VGAM HOST TARGET RNA, such as BINDING SITE I, BINDING SITE II and BINDING SITE III, inhibits translation of VGAM349 host target RNA, herein designated VGAM HOST TARGET RNA, into VGAM349 host target protein, herein designated VGAM HOST TARGET PROTEIN. VGAM host target protein is therefore outlined by a broken line.

[4848] It is appreciated that VGAM349 host target gene, herein designated VGAM HOST TARGET GENE, in fact represents a plurality of VGAM349 host target genes. The mRNA of each one of this plurality of VGAM349 host target genes comprises one or more host target binding sites, each having a nucleotide sequence which is at least partly complementary to VGAM349 RNA, herein designated VGAM RNA, and which when bound by VGAM349 RNA, herein designated VGAM RNA, causes inhibition of translation of respective one or more VGAM349 host target proteins.

[4849] It is further appreciated by one skilled in the art that the mode of translational inhibition illustrated by FIG. 1 with specific reference to translational inhibition exerted by VGAM349 gene, herein designated VGAM GENE, on one or more VGAM349 host target gene, herein designated VGAM HOST TARGET GENE, is in fact common to other known non-viral miRNA genes. As mentioned hereinabove with reference to the background section, although a specific complementary binding site has been demonstrated only for some of the known miRNA genes (primarily Lin-4 and Let-7), all other recently discovered miRNA genes are also believed by those skilled in the art to modulate expression of other genes by complementary binding, although specific complementary binding sites of these other miRNA genes have not yet been found (Ruvkun G., Perspective: Glimpses of a tiny RNA world, Science 294, 779 (2001)).

[4850] It is yet further appreciated that a function of VGAM349 is inhibition of expression of host target genes, as part of a novel viral mechanism of attacking a host. Accordingly, utilities of VGAM349 include diagnosis, prevention and treatment of viral infection by Vaccinia virus. Specific functions, and accordingly utilities, of VGAM349 correlate with, and may be deduced from, the identity of the host target genes which VGAM349 binds and inhibits, and the function of these host target genes, as elaborated hereinbelow.

[4851] Nucleotide sequences of the VGAM349 precursor RNA, herein designated VGAM PRECURSOR RNA, and of the diced VGAM349 RNA, herein designated VGAM RNA, and a schematic representation of the secondary folding of VGAM349 folded precursor RNA, herein designated VGAM FOLDED PRECURSOR RNA, of VGAM349 are further described hereinbelow with reference to Table 1.

[4852] Nucleotide sequences of host target binding sites, such as BINDING SITE-I, BINDING SITE-II and BINDING SITE-III of FIG. 1, found on, and schematic representation of the complementarity of each of these host target binding sites to VGAM349 RNA, herein designated VGAM RNA, are described hereinbelow with reference to Table 2.

[4853] FIG. 1 further provides a conceptual description of another novel bioinformatically detected viral gene of the present invention, referred to here as Viral Genomic Address Messenger 350 (VGAM350) viral gene, which modulates expression of respective host target genes thereof, the function and utility of which host target genes is known in the art.

[4854] VGAM350 is a novel bioinformatically detected regulatory, non protein coding, viral micro RNA (miRNA) gene. The method by which VGAM350 was detected is described hereinabove with reference to FIGS. 2-8.

[4855] VGAM350 gene, herein designated VGAM GENE, is a viral gene contained in the genome of Vaccinia virus. VGAM350 host target gene, herein designated VGAM HOST TARGET GENE, is a human gene contained in the human genome.

[4856] VGAM350 gene, herein designated VGAM GENE, encodes a VGAM350 precursor RNA, herein designated VGAM PRECURSOR RNA. Similar to other miRNA genes, and unlike most ordinary genes, VGAM350 precursor RNA, herein designated VGAM PRECURSOR RNA, does not encode a protein. A nucleotide sequence identical or highly similar to the nucleotide sequence of VGAM350 precursor RNA is designated SEQ ID:336, and is provided hereinbelow with reference to the sequence listing part. Nucleotide sequence SEQ ID:336 is located at position 963 relative to the genome of Vaccinia virus.

[4857] VGAM350 precursor RNA, herein designated VGAM PRECURSOR RNA, folds onto itself, forming VGAM350 folded precursor RNA, herein designated VGAM FOLDED PRECURSOR RNA, which has a two-dimensional hairpin structure. As is well known in the art, this hairpin structure, is typical of RNA encoded by miRNA genes, and is due to the fact that the nucleotide sequence of the first half of the RNA encoded by a miRNA gene is an accurate or partial inversed-reversed sequence of the nucleotide sequence of the second half thereof.

[4858] An enzyme complex designated DICER COMPLEX, dices the VGAM350 folded precursor RNA, herein designated VGAM FOLDED PRECURSOR RNA, into VGAM350 RNA, herein designated VGAM RNA, a single stranded ˜22 nt long RNA segment. As is known in the art, dicing of a hairpin structured RNA precursor product into a short ˜22 nt RNA segment is catalyzed by an enzyme complex comprising an enzyme called Dicer together with other necessary proteins. A probable (over 92%) nucleotide sequence of VGAM350 RNA is designated SEQ ID:685, and is provided hereinbelow with reference to the sequence listing part.

[4859] VGAM350 host target gene, herein designated VGAM HOST TARGET GENE, encodes a corresponding messenger RNA, VGAM350 host target RNA, herein designated VGAM HOST TARGET RNA. VGAM350 host target RNA, herein designated VGAM HOST TARGET RNA, comprises three regions, as is typical of mRNA of a protein coding gene: a 5 untranslated region, a protein coding region and a 3 untranslated region, designated 5UTR, PROTEIN CODING and 3UTR respectively.

[4860] VGAM350 RNA, herein designated VGAM RNA, binds complementarily to one or more host target binding sites located in untranslated regions of VGAM350 host target RNA, herein designated VGAM HOST TARGET RNA. This complementary binding is due to the fact that the nucleotide sequence of VGAM350 RNA, herein designated VGAM RNA, is an accurate or a partial inversed-reversed sequence of the nucleotide sequence of each of the host target binding sites. As an illustration, FIG. 1 shows 3 such host target binding sites, designated BINDING SITE I, BINDING SITE II and BINDING SITE III respectively. It is appreciated that the number of host target binding sites shown in FIG. 1 is meant as an illustration only, and is not meant to be limiting VGAM350 RNA, herein designated VGAM RNA, may have a different number of host target binding sites in untranslated regions of a VGAM350 host target RNA, herein designated VGAM HOST TARGET RNA. It is further appreciated that while FIG. 1 depicts host target binding sites in the 3UTR region, this is meant as an example only these host target binding sites may be located in the 3UTR region, the 5UTR region, or in both 3UTR and 5UTR regions.

[4861] The complementary binding of VGAM350 RNA, herein designated VGAM RNA, to host target binding sites on VGAM350 host target RNA, herein designated VGAM HOST TARGET RNA, such as BINDING SITE I, BINDING SITE II and BINDING SITE III, inhibits translation of VGAM350 host target RNA, herein designated VGAM HOST TARGET RNA, into VGAM350 host target protein, herein designated VGAM HOST TARGET PROTEIN. VGAM host target protein is therefore outlined by a broken line.

[4862] It is appreciated that VGAM350 host target gene, herein designated VGAM HOST TARGET GENE, in fact represents a plurality of VGAM350 host target genes. The mRNA of each one of this plurality of VGAM350 host target genes comprises one or more host target binding sites, each having a nucleotide sequence which is at least partly complementary to VGAM350 RNA, herein designated VGAM RNA, and which when bound by VGAM350 RNA, herein designated VGAM RNA, causes inhibition of translation of respective one or more VGAM350 host target proteins.

[4863] It is further appreciated by one skilled in the art that the mode of translational inhibition illustrated by FIG. 1 with specific reference to translational inhibition exerted by VGAM350 gene, herein designated VGAM GENE, on one or more VGAM350 host target gene, herein designated VGAM HOST TARGET GENE, is in fact common to other known non-viral miRNA genes. As mentioned hereinabove with reference to the background section, although a specific complementary binding site has been demonstrated only for some of the known miRNA genes (primarily Lin-4 and Let-7), all other recently discovered miRNA genes are also believed by those skilled in the art to modulate expression of other genes by complementary binding, although specific complementary binding sites of these other miRNA genes have not yet been found (Ruvkun G., Perspective: Glimpses of a tiny RNA world, Science 294, 779 (2001)).

[4864] It is yet further appreciated that a function of VGAM350 is inhibition of expression of host target genes, as part of a novel viral mechanism of attacking a host. Accordingly, utilities of VGAM350 include diagnosis, prevention and treatment of viral infection by Vaccinia virus. Specific functions, and accordingly utilities, of VGAM350 correlate with, and may be deduced from, the identity of the host target genes which VGAM350 binds and inhibits, and the function of these host target genes, as elaborated hereinbelow.

[4865] Nucleotide sequences of the VGAM350 precursor RNA, herein designated VGAM PRECURSOR RNA, and of the diced VGAM350 RNA, herein designated VGAM RNA, and a schematic representation of the secondary folding of VGAM350 folded precursor RNA, herein designated VGAM FOLDED PRECURSOR RNA, of VGAM350 are further described hereinbelow with reference to Table 1.

[4866] Nucleotide sequences of host target binding sites, such as BINDING SITE-I, BINDING SITE-II and BINDING SITE-III of FIG. 1, found on, and schematic representation of the complementarity of each of these host target binding sites to VGAM350 RNA, herein designated VGAM RNA, are described hereinbelow with reference to Table 2.

[4867] FIG. 1 further provides a conceptual description of another novel bioinformatically detected viral gene of the present invention, referred to here as Viral Genomic Address Messenger 351 (VGAM351) viral gene, which modulates expression of respective host target genes thereof, the function and utility of which host target genes is known in the art.

[4868] VGAM351 is a novel bioinformatically detected regulatory, non protein coding, viral micro RNA (miRNA) gene. The method by which VGAM351 was detected is described hereinabove with reference to FIGS. 2-8.

[4869] VGAM351 gene, herein designated VGAM GENE, is a viral gene contained in the genome of Vaccinia virus. VGAM351 host target gene, herein designated VGAM HOST TARGET GENE, is a human gene contained in the human genome.

[4870] VGAM351 gene, herein designated VGAM GENE, encodes a VGAM351 precursor RNA, herein designated VGAM PRECURSOR RNA. Similar to other miRNA genes, and unlike most ordinary genes, VGAM351 precursor RNA, herein designated VGAM PRECURSOR RNA, does not encode a protein. A nucleotide sequence identical or highly similar to the nucleotide sequence of VGAM351 precursor RNA is designated SEQ ID:337, and is provided hereinbelow with reference to the sequence listing part. Nucleotide sequence SEQ ID:337 is located at position 963 relative to the genome of Vaccinia virus.

[4871] VGAM351 precursor RNA, herein designated VGAM PRECURSOR RNA, folds onto itself, forming VGAM351 folded precursor RNA, herein designated VGAM FOLDED PRECURSOR RNA, which has a two-dimensional hairpin structure. As is well known in the art, this hairpin structure, is typical of RNA encoded by miRNA genes, and is due to the fact that the nucleotide sequence of the first half of the RNA encoded by a miRNA gene is an accurate or partial inversed-reversed sequence of the nucleotide sequence of the second half thereof.

[4872] An enzyme complex designated DICER COMPLEX, dices the VGAM351 folded precursor RNA, herein designated VGAM FOLDED PRECURSOR RNA, into VGAM351 RNA, herein designated VGAM RNA, a single stranded ˜22 nt long RNA segment. As is known in the art, dicing of a hairpin structured RNA precursor product into a short ˜22 nt RNA segment is catalyzed by an enzyme complex comprising an enzyme called Dicer together with other necessary proteins. A probable (over 92%) nucleotide sequence of VGAM351 RNA is designated SEQ ID:686, and is provided hereinbelow with reference to the sequence listing part.

[4873] VGAM351 host target gene, herein designated VGAM HOST TARGET GENE, encodes a corresponding messenger RNA, VGAM351 host target RNA, herein designated VGAM HOST TARGET RNA. VGAM351 host target RNA, herein designated VGAM HOST TARGET RNA, comprises three regions, as is typical of mRNA of a protein coding gene: a 5 untranslated region, a protein coding region and a 3 untranslated region, designated 5UTR, PROTEIN CODING and 3UTR respectively.

[4874] VGAM351 RNA, herein designated VGAM RNA, binds complementarily to one or more host target binding sites located in untranslated regions of VGAM351 host target RNA, herein designated VGAM HOST TARGET RNA. This complementary binding is due to the fact that the nucleotide sequence of VGAM351 RNA, herein designated VGAM RNA, is an accurate or a partial inversed-reversed sequence of the nucleotide sequence of each of the host target binding sites. As an illustration, FIG. 1 shows 3 such host target binding sites, designated BINDING SITE I, BINDING SITE II and BINDING SITE III respectively. It is appreciated that the number of host target binding sites shown in FIG. 1 is meant as an illustration only, and is not meant to be limiting VGAM351 RNA, herein designated VGAM RNA, may have a different number of host target binding sites in untranslated regions of a VGAM351 host target RNA, herein designated VGAM HOST TARGET RNA. It is further appreciated that while FIG. 1 depicts host target binding sites in the 3UTR region, this is meant as an example only these host target binding sites may be located in the 3UTR region, the 5UTR region, or in both 3UTR and 5UTR regions.

[4875] The complementary binding of VGAM351 RNA, herein designated VGAM RNA, to host target binding sites on VGAM351 host target RNA, herein designated VGAM HOST TARGET RNA, such as BINDING SITE I, BINDING SITE II and BINDING SITE III, inhibits translation of VGAM351 host target RNA, herein designated VGAM HOST TARGET RNA, into VGAM351 host target protein, herein designated VGAM HOST TARGET PROTEIN. VGAM host target protein is therefore outlined by a broken line.

[4876] It is appreciated that VGAM351 host target gene, herein designated VGAM HOST TARGET GENE, in fact represents a plurality of VGAM351 host target genes. The mRNA of each one of this plurality of VGAM351 host target genes comprises one or more host target binding sites, each having a nucleotide sequence which is at least partly complementary to VGAM351 RNA, herein designated VGAM RNA, and which when bound by VGAM351 RNA, herein designated VGAM RNA, causes inhibition of translation of respective one or more VGAM351 host target proteins.

[4877] It is further appreciated by one skilled in the art that the mode of translational inhibition illustrated by FIG. 1 with specific reference to translational inhibition exerted by VGAM351 gene, herein designated VGAM GENE, on one or more VGAM351 host target gene, herein designated VGAM HOST TARGET GENE, is in fact common to other known non-viral miRNA genes. As mentioned hereinabove with reference to the background section, although a specific complementary binding site has been demonstrated only for some of the known miRNA genes (primarily Lin-4 and Let-7), all other recently discovered miRNA genes are also believed by those skilled in the art to modulate expression of other genes by complementary binding, although specific complementary binding sites of these other miRNA genes have not yet been found (Ruvkun G., Perspective: Glimpses of a tiny RNA world, Science 294, 779 (2001)).

[4878] It is yet further appreciated that a function of VGAM351 is inhibition of expression of host target genes, as part of a novel viral mechanism of attacking a host. Accordingly, utilities of VGAM351 include diagnosis, prevention and treatment of viral infection by Vaccinia virus. Specific functions, and accordingly utilities, of VGAM351 correlate with, and may be deduced from, the identity of the host target genes which VGAM351 binds and inhibits, and the function of these host target genes, as elaborated hereinbelow.

[4879] Nucleotide sequences of the VGAM351 precursor RNA, herein designated VGAM PRECURSOR RNA, and of the diced VGAM351 RNA, herein designated VGAM RNA, and a schematic representation of the secondary folding of VGAM351 folded precursor RNA, herein designated VGAM FOLDED PRECURSOR RNA, of VGAM351 are further described hereinbelow with reference to Table 1.

[4880] Nucleotide sequences of host target binding sites, such as BINDING SITE-I, BINDING SITE-II and BINDING SITE-III of FIG. 1, found on, and schematic representation of the complementarity of each of these host target binding sites to VGAM351 RNA, herein designated VGAM RNA, are described hereinbelow with reference to Table 2.

[4881] FIG. 1 further provides a conceptual description of another novel bioinformatically detected viral gene of the present invention, referred to here as Viral Genomic Address Messenger 352 (VGAM352) viral gene, which modulates expression of respective host target genes thereof, the function and utility of which host target genes is known in the art.

[4882] VGAM352 is a novel bioinformatically detected regulatory, non protein coding, viral micro RNA (miRNA) gene. The method by which VGAM352 was detected is described hereinabove with reference to FIGS. 2-8.

[4883] VGAM352 gene, herein designated VGAM GENE, is a viral gene contained in the genome of Vaccinia virus. VGAM352 host target gene, herein designated VGAM HOST TARGET GENE, is a human gene contained in the human genome.

[4884] VGAM352 gene, herein designated VGAM GENE, encodes a VGAM352 precursor RNA, herein designated VGAM PRECURSOR RNA. Similar to other miRNA genes, and unlike most ordinary genes, VGAM352 precursor RNA, herein designated VGAM PRECURSOR RNA, does not encode a protein. A nucleotide sequence identical or highly similar to the nucleotide sequence of VGAM352 precursor RNA is designated SEQ ID:338, and is provided hereinbelow with reference to the sequence listing part. Nucleotide sequence SEQ ID:338 is located at position 2576 relative to the genome of Vaccinia virus.

[4885] VGAM352 precursor RNA, herein designated VGAM PRECURSOR RNA, folds onto itself, forming VGAM352 folded precursor RNA, herein designated VGAM FOLDED PRECURSOR RNA, which has a two-dimensional hairpin structure. As is well known in the art, this hairpin structure, is typical of RNA encoded by miRNA genes, and is due to the fact that the nucleotide sequence of the first half of the RNA encoded by a miRNA gene is an accurate or partial inversed-reversed sequence of the nucleotide sequence of the second half thereof.

[4886] An enzyme complex designated DICER COMPLEX, dices the VGAM352 folded precursor RNA, herein designated VGAM FOLDED PRECURSOR RNA, into VGAM352 RNA, herein designated VGAM RNA, a single stranded ˜22 nt long RNA segment. As is known in the art, dicing of a hairpin structured RNA precursor product into a short ˜22 nt RNA segment is catalyzed by an enzyme complex comprising an enzyme called Dicer together with other necessary proteins. A probable (over 92%) nucleotide sequence of VGAM352 RNA is designated SEQ ID:687, and is provided hereinbelow with reference to the sequence listing part.

[4887] VGAM352 host target gene, herein designated VGAM HOST TARGET GENE, encodes a corresponding messenger RNA, VGAM352 host target RNA, herein designated VGAM HOST TARGET RNA. VGAM352 host target RNA, herein designated VGAM HOST TARGET RNA, comprises three regions, as is typical of mRNA of a protein coding gene: a 5 untranslated region, a protein coding region and a 3 untranslated region, designated 5UTR, PROTEIN CODING and 3UTR respectively.

[4888] VGAM352 RNA, herein designated VGAM RNA, binds complementarily to one or more host target binding sites located in untranslated regions of VGAM352 host target RNA, herein designated VGAM HOST TARGET RNA. This complementary binding is due to the fact that the nucleotide sequence of VGAM352 RNA, herein designated VGAM RNA, is an accurate or a partial inversed-reversed sequence of the nucleotide sequence of each of the host target binding sites. As an illustration, FIG. 1 shows 3 such host target binding sites, designated BINDING SITE I, BINDING SITE II and BINDING SITE III respectively. It is appreciated that the number of host target binding sites shown in FIG. 1 is meant as an illustration only, and is not meant to be limiting VGAM352 RNA, herein designated VGAM RNA, may have a different number of host target binding sites in untranslated regions of a VGAM352 host target RNA, herein designated VGAM HOST TARGET RNA. It is further appreciated that while FIG. 1 depicts host target binding sites in the 3UTR region, this is meant as an example only these host target binding sites may be located in the 3UTR region, the 5UTR region, or in both 3UTR and 5UTR regions.

[4889] The complementary binding of VGAM352 RNA, herein designated VGAM RNA, to host target binding sites on VGAM352 host target RNA, herein designated VGAM HOST TARGET RNA, such as BINDING SITE I, BINDING SITE II and BINDING SITE III, inhibits translation of VGAM352 host target RNA, herein designated VGAM HOST TARGET RNA, into VGAM352 host target protein, herein designated VGAM HOST TARGET PROTEIN. VGAM host target protein is therefore outlined by a broken line.

[4890] It is appreciated that VGAM352 host target gene, herein designated VGAM HOST TARGET GENE, in fact represents a plurality of VGAM352 host target genes. The mRNA of each one of this plurality of VGAM352 host target genes comprises one or more host target binding sites, each having a nucleotide sequence which is at least partly complementary to VGAM352 RNA, herein designated VGAM RNA, and which when bound by VGAM352 RNA, herein designated VGAM RNA, causes inhibition of translation of respective one or more VGAM352 host target proteins.

[4891] It is further appreciated by one skilled in the art that the mode of translational inhibition illustrated by FIG. 1 with specific reference to translational inhibition exerted by VGAM352 gene, herein designated VGAM GENE, on one or more VGAM352 host target gene, herein designated VGAM HOST TARGET GENE, is in fact common to other known non-viral miRNA genes. As mentioned hereinabove with reference to the background section, although a specific complementary binding site has been demonstrated only for some of the known miRNA genes (primarily Lin-4 and Let-7), all other recently discovered miRNA genes are also believed by those skilled in the art to modulate expression of other genes by complementary binding, although specific complementary binding sites of these other miRNA genes have not yet been found (Ruvkun G., Perspective: Glimpses of a tiny RNA world, Science 294, 779 (2001)).

[4892] It is yet further appreciated that a function of VGAM352 is inhibition of expression of host target genes, as part of a novel viral mechanism of attacking a host. Accordingly, utilities of VGAM352 include diagnosis, prevention and treatment of viral infection by Vaccinia virus. Specific functions, and accordingly utilities, of VGAM352 correlate with, and may be deduced from, the identity of the host target genes which VGAM352 binds and inhibits, and the function of these host target genes, as elaborated hereinbelow.

[4893] Nucleotide sequences of the VGAM352 precursor RNA, herein designated VGAM PRECURSOR RNA, and of the diced VGAM352 RNA, herein designated VGAM RNA, and a schematic representation of the secondary folding of VGAM352 folded precursor RNA, herein designated VGAM FOLDED PRECURSOR RNA, of VGAM352 are further described hereinbelow with reference to Table 1.

[4894] Nucleotide sequences of host target binding sites, such as BINDING SITE-I, BINDING SITE-II and BINDING SITE-III of FIG. 1, found on, and schematic representation of the complementarity of each of these host target binding sites to VGAM352 RNA, herein designated VGAM RNA, are described hereinbelow with reference to Table 2.

[4895] FIG. 1 further provides a conceptual description of another novel bioinformatically detected viral gene of the present invention, referred to here as Viral Genomic Address Messenger 353 (VGAM353) viral gene, which modulates expression of respective host target genes thereof, the function and utility of which host target genes is known in the art.

[4896] VGAM353 is a novel bioinformatically detected regulatory, non protein coding, viral micro RNA (miRNA) gene. The method by which VGAM353 was detected is described hereinabove with reference to FIGS. 2-8.

[4897] VGAM353 gene, herein designated VGAM GENE, is a viral gene contained in the genome of Vaccinia virus. VGAM353 host target gene, herein designated VGAM HOST TARGET GENE, is a human gene contained in the human genome.

[4898] VGAM353 gene, herein designated VGAM GENE, encodes a VGAM353 precursor RNA, herein designated VGAM PRECURSOR RNA. Similar to other miRNA genes, and unlike most ordinary genes, VGAM353 precursor RNA, herein designated VGAM PRECURSOR RNA, does not encode a protein. A nucleotide sequence identical or highly similar to the nucleotide sequence of VGAM353 precursor RNA is designated SEQ ID:339, and is provided hereinbelow with reference to the sequence listing part. Nucleotide sequence SEQ ID:339 is located at position 4213 relative to the genome of Vaccinia virus.

[4899] VGAM353 precursor RNA, herein designated VGAM PRECURSOR RNA, folds onto itself, forming VGAM353 folded precursor RNA, herein designated VGAM FOLDED PRECURSOR RNA, which has a two-dimensional hairpin structure. As is well known in the art, this hairpin structure, is typical of RNA encoded by miRNA genes, and is due to the fact that the nucleotide sequence of the first half of the RNA encoded by a miRNA gene is an accurate or partial inversed-reversed sequence of the nucleotide sequence of the second half thereof.

[4900] An enzyme complex designated DICER COMPLEX, dices the VGAM353 folded precursor RNA, herein designated VGAM FOLDED PRECURSOR RNA, into VGAM353 RNA, herein designated VGAM RNA, a single stranded ˜22 nt long RNA segment. As is known in the art, dicing of a hairpin structured RNA precursor product into a short ˜22 nt RNA segment is catalyzed by an enzyme complex comprising an enzyme called Dicer together with other necessary proteins. A probable (over 92%) nucleotide sequence of VGAM353 RNA is designated SEQ ID:688, and is provided hereinbelow with reference to the sequence listing part.

[4901] VGAM353 host target gene, herein designated VGAM HOST TARGET GENE, encodes a corresponding messenger RNA, VGAM353 host target RNA, herein designated VGAM HOST TARGET RNA. VGAM353 host target RNA, herein designated VGAM HOST TARGET RNA, comprises three regions, as is typical of mRNA of a protein coding gene: a 5 untranslated region, a protein coding region and a 3 untranslated region, designated 5UTR, PROTEIN CODING and 3UTR respectively.

[4902] VGAM353 RNA, herein designated VGAM RNA, binds complementarily to one or more host target binding sites located in untranslated regions of VGAM353 host target RNA, herein designated VGAM HOST TARGET RNA. This complementary binding is due to the fact that the nucleotide sequence of VGAM353 RNA, herein designated VGAM RNA, is an accurate or a partial inversed-reversed sequence of the nucleotide sequence of each of the host target binding sites. As an illustration, FIG. 1 shows 3 such host target binding sites, designated BINDING SITE I, BINDING SITE II and BINDING SITE III respectively. It is appreciated that the number of host target binding sites shown in FIG. 1 is meant as an illustration only, and is not meant to be limiting VGAM353 RNA, herein designated VGAM RNA, may have a different number of host target binding sites in untranslated regions of a VGAM353 host target RNA, herein designated VGAM HOST TARGET RNA. It is further appreciated that while FIG. 1 depicts host target binding sites in the 3UTR region, this is meant as an example only these host target binding sites may be located in the 3UTR region, the 5UTR region, or in both 3UTR and 5UTR regions.

[4903] The complementary binding of VGAM353 RNA, herein designated VGAM RNA, to host target binding sites on VGAM353 host target RNA, herein designated VGAM HOST TARGET RNA, such as BINDING SITE I, BINDING SITE II and BINDING SITE III, inhibits translation of VGAM353 host target RNA, herein designated VGAM HOST TARGET RNA, into VGAM353 host target protein, herein designated VGAM HOST TARGET PROTEIN. VGAM host target protein is therefore outlined by a broken line.

[4904] It is appreciated that VGAM353 host target gene, herein designated VGAM HOST TARGET GENE, in fact represents a plurality of VGAM353 host target genes. The mRNA of each one of this plurality of VGAM353 host target genes comprises one or more host target binding sites, each having a nucleotide sequence which is at least partly complementary to VGAM353 RNA, herein designated VGAM RNA, and which when bound by VGAM353 RNA, herein designated VGAM RNA, causes inhibition of translation of respective one or more VGAM353 host target proteins.

[4905] It is further appreciated by one skilled in the art that the mode of translational inhibition illustrated by FIG. 1 with specific reference to translational inhibition exerted by VGAM353 gene, herein designated VGAM GENE, on one or more VGAM353 host target gene, herein designated VGAM HOST TARGET GENE, is in fact common to other known non-viral miRNA genes. As mentioned hereinabove with reference to the background section, although a specific complementary binding site has been demonstrated only for some of the known miRNA genes (primarily Lin-4 and Let-7), all other recently discovered miRNA genes are also believed by those skilled in the art to modulate expression of other genes by complementary binding, although specific complementary binding sites of these other miRNA genes have not yet been found (Ruvkun G., Perspective: Glimpses of a tiny RNA world, Science 294, 779 (2001)).

[4906] It is yet further appreciated that a function of VGAM353 is inhibition of expression of host target genes, as part of a novel viral mechanism of attacking a host. Accordingly, utilities of VGAM353 include diagnosis, prevention and treatment of viral infection by Vaccinia virus. Specific functions, and accordingly utilities, of VGAM353 correlate with, and may be deduced from, the identity of the host target genes which VGAM353 binds and inhibits, and the function of these host target genes, as elaborated hereinbelow.

[4907] Nucleotide sequences of the VGAM353 precursor RNA, herein designated VGAM PRECURSOR RNA, and of the diced VGAM353 RNA, herein designated VGAM RNA, and a schematic representation of the secondary folding of VGAM353 folded precursor RNA, herein designated VGAM FOLDED PRECURSOR RNA, of VGAM353 are further described hereinbelow with reference to Table 1.

[4908] Nucleotide sequences of host target binding sites, such as BINDING SITE-I, BINDING SITE-II and BINDING SITE-III of FIG. 1, found on, and schematic representation of the complementarity of each of these host target binding sites to VGAM353 RNA, herein designated VGAM RNA, are described hereinbelow with reference to Table 2.

[4909] FIG. 1 further provides a conceptual description of another novel bioinformatically detected viral gene of the present invention, referred to here as Viral Genomic Address Messenger 354 (VGAM354) viral gene, which modulates expression of respective host target genes thereof, the function and utility of which host target genes is known in the art.

[4910] VGAM354 is a novel bioinformatically detected regulatory, non protein coding, viral micro RNA (miRNA) gene. The method by which VGAM354 was detected is described hereinabove with reference to FIGS. 2-8.

[4911] VGAM354 gene, herein designated VGAM GENE, is a viral gene contained in the genome of Vaccinia virus. VGAM354 host target gene, herein designated VGAM HOST TARGET GENE, is a human gene contained in the human genome.

[4912] VGAM354 gene, herein designated VGAM GENE, encodes a VGAM354 precursor RNA, herein designated VGAM PRECURSOR RNA. Similar to other miRNA genes, and unlike most ordinary genes, VGAM354 precursor RNA, herein designated VGAM PRECURSOR RNA, does not encode a protein. A nucleotide sequence identical or highly similar to the nucleotide sequence of VGAM354 precursor RNA is designated SEQ ID:340, and is provided hereinbelow with reference to the sequence listing part. Nucleotide sequence SEQ ID:340 is located at position 3249 relative to the genome of Vaccinia virus.

[4913] VGAM354 precursor RNA, herein designated VGAM PRECURSOR RNA, folds onto itself, forming VGAM354 folded precursor RNA, herein designated VGAM FOLDED PRECURSOR RNA, which has a two-dimensional hairpin structure. As is well known in the art, this hairpin structure, is typical of RNA encoded by miRNA genes, and is due to the fact that the nucleotide sequence of the first half of the RNA encoded by a miRNA gene is an accurate or partial inversed-reversed sequence of the nucleotide sequence of the second half thereof.

[4914] An enzyme complex designated DICER COMPLEX, dices the VGAM354 folded precursor RNA, herein designated VGAM FOLDED PRECURSOR RNA, into VGAM354 RNA, herein designated VGAM RNA, a single stranded ˜22 nt long RNA segment. As is known in the art, dicing of a hairpin structured RNA precursor product into a short ˜22 nt RNA segment is catalyzed by an enzyme complex comprising an enzyme called Dicer together with other necessary proteins. A probable (over 76%) nucleotide sequence of VGAM354 RNA is designated SEQ ID:689, and is provided hereinbelow with reference to the sequence listing part.

[4915] VGAM354 host target gene, herein designated VGAM HOST TARGET GENE, encodes a corresponding messenger RNA, VGAM354 host target RNA, herein designated VGAM HOST TARGET RNA. VGAM354 host target RNA, herein designated VGAM HOST TARGET RNA, comprises three regions, as is typical of mRNA of a protein coding gene: a 5 untranslated region, a protein coding region and a 3 untranslated region, designated 5UTR, PROTEIN CODING and 3UTR respectively.

[4916] VGAM354 RNA, herein designated VGAM RNA, binds complementarily to one or more host target binding sites located in untranslated regions of VGAM354 host target RNA, herein designated VGAM HOST TARGET RNA. This complementary binding is due to the fact that the nucleotide sequence of VGAM354 RNA, herein designated VGAM RNA, is an accurate or a partial inversed-reversed sequence of the nucleotide sequence of each of the host target binding sites. As an illustration, FIG. 1 shows 3 such host target binding sites, designated BINDING SITE I, BINDING SITE II and BINDING SITE III respectively. It is appreciated that the number of host target binding sites shown in FIG. 1 is meant as an illustration only, and is not meant to be limiting VGAM354 RNA, herein designated VGAM RNA, may have a different number of host target binding sites in untranslated regions of a VGAM354 host target RNA, herein designated VGAM HOST TARGET RNA. It is further appreciated that while FIG. 1 depicts host target binding sites in the 3UTR region, this is meant as an example only these host target binding sites may be located in the 3UTR region, the 5UTR region, or in both 3UTR and 5UTR regions.

[4917] The complementary binding of VGAM354 RNA, herein designated VGAM RNA, to host target binding sites on VGAM354 host target RNA, herein designated VGAM HOST TARGET RNA, such as BINDING SITE I, BINDING SITE II and BINDING SITE III, inhibits translation of VGAM354 host target RNA, herein designated VGAM HOST TARGET RNA, into VGAM354 host target protein, herein designated VGAM HOST TARGET PROTEIN. VGAM host target protein is therefore outlined by a broken line.

[4918] It is appreciated that VGAM354 host target gene, herein designated VGAM HOST TARGET GENE, in fact represents a plurality of VGAM354 host target genes. The mRNA of each one of this plurality of VGAM354 host target genes comprises one or more host target binding sites, each having a nucleotide sequence which is at least partly complementary to VGAM354 RNA, herein designated VGAM RNA, and which when bound by VGAM354 RNA, herein designated VGAM RNA, causes inhibition of translation of respective one or more VGAM354 host target proteins.

[4919] It is further appreciated by one skilled in the art that the mode of translational inhibition illustrated by FIG. 1 with specific reference to translational inhibition exerted by VGAM354 gene, herein designated VGAM GENE, on one or more VGAM354 host target gene, herein designated VGAM HOST TARGET GENE, is in fact common to other known non-viral miRNA genes. As mentioned hereinabove with reference to the background section, although a specific complementary binding site has been demonstrated only for some of the known miRNA genes (primarily Lin-4 and Let-7), all other recently discovered miRNA genes are also believed by those skilled in the art to modulate expression of other genes by complementary binding, although specific complementary binding sites of these other miRNA genes have not yet been found (Ruvkun G., Perspective: Glimpses of a tiny RNA world, Science 294, 779 (2001)).

[4920] It is yet further appreciated that a function of VGAM354 is inhibition of expression of host target genes, as part of a novel viral mechanism of attacking a host. Accordingly, utilities of VGAM354 include diagnosis, prevention and treatment of viral infection by Vaccinia virus. Specific functions, and accordingly utilities, of VGAM354 correlate with, and may be deduced from, the identity of the host target genes which VGAM354 binds and inhibits, and the function of these host target genes, as elaborated hereinbelow.

[4921] Nucleotide sequences of the VGAM354 precursor RNA, herein designated VGAM PRECURSOR RNA, and of the diced VGAM354 RNA, herein designated VGAM RNA, and a schematic representation of the secondary folding of VGAM354 folded precursor RNA, herein designated VGAM FOLDED PRECURSOR RNA, of VGAM354 are further described hereinbelow with reference to Table 1.

[4922] Nucleotide sequences of host target binding sites, such as BINDING SITE-I, BINDING SITE-II and BINDING SITE-III of FIG. 1, found on, and schematic representation of the complementarity of each of these host target binding sites to VGAM354 RNA, herein designated VGAM RNA, are described hereinbelow with reference to Table 2.

[4923] FIG. 1 further provides a conceptual description of another novel bioinformatically detected viral gene of the present invention, referred to here as Viral Genomic Address Messenger 355 (VGAM355) viral gene, which modulates expression of respective host target genes thereof, the function and utility of which host target genes is known in the art.

[4924] VGAM355 is a novel bioinformatically detected regulatory, non protein coding, viral micro RNA (miRNA) gene. The method by which VGAM355 was detected is described hereinabove with reference to FIGS. 2-8.

[4925] VGAM355 gene, herein designated VGAM GENE, is a viral gene contained in the genome of Vaccinia virus. VGAM355 host target gene, herein designated VGAM HOST TARGET GENE, is a human gene contained in the human genome.

[4926] VGAM355 gene, herein designated VGAM GENE, encodes a VGAM355 precursor RNA, herein designated VGAM PRECURSOR RNA. Similar to other miRNA genes, and unlike most ordinary genes, VGAM355 precursor RNA, herein designated VGAM PRECURSOR RNA, does not encode a protein. A nucleotide sequence identical or highly similar to the nucleotide sequence of VGAM355 precursor RNA is designated SEQ ID:341, and is provided hereinbelow with reference to the sequence listing part. Nucleotide sequence SEQ ID:341 is located at position 3686 relative to the genome of Vaccinia virus.

[4927] VGAM355 precursor RNA, herein designated VGAM PRECURSOR RNA, folds onto itself, forming VGAM355 folded precursor RNA, herein designated VGAM FOLDED PRECURSOR RNA, which has a two-dimensional hairpin structure. As is well known in the art, this hairpin structure, is typical of RNA encoded by miRNA genes, and is due to the fact that the nucleotide sequence of the first half of the RNA encoded by a miRNA gene is an accurate or partial inversed-reversed sequence of the nucleotide sequence of the second half thereof.

[4928] An enzyme complex designated DICER COMPLEX, dices the VGAM355 folded precursor RNA, herein designated VGAM FOLDED PRECURSOR RNA, into VGAM355 RNA, herein designated VGAM RNA, a single stranded ˜22 nt long RNA segment. As is known in the art, dicing of a hairpin structured RNA precursor product into a short ˜22 nt RNA segment is catalyzed by an enzyme complex comprising an enzyme called Dicer together with other necessary proteins. A probable (over 74%) nucleotide sequence of VGAM355 RNA is designated SEQ ID:690, and is provided hereinbelow with reference to the sequence listing part.

[4929] VGAM355 host target gene, herein designated VGAM HOST TARGET GENE, encodes a corresponding messenger RNA, VGAM355 host target RNA, herein designated VGAM HOST TARGET RNA. VGAM355 host target RNA, herein designated VGAM HOST TARGET RNA, comprises three regions, as is typical of mRNA of a protein coding gene: a 5 untranslated region, a protein coding region and a 3 untranslated region, designated 5UTR, PROTEIN CODING and 3UTR respectively.

[4930] VGAM355 RNA, herein designated VGAM RNA, binds complementarily to one or more host target binding sites located in untranslated regions of VGAM355 host target RNA, herein designated VGAM HOST TARGET RNA. This complementary binding is due to the fact that the nucleotide sequence of VGAM355 RNA, herein designated VGAM RNA, is an accurate or a partial inversed-reversed sequence of the nucleotide sequence of each of the host target binding sites. As an illustration, FIG. 1 shows 3 such host target binding sites, designated BINDING SITE I, BINDING SITE II and BINDING SITE III respectively. It is appreciated that the number of host target binding sites shown in FIG. 1 is meant as an illustration only, and is not meant to be limiting VGAM355 RNA, herein designated VGAM RNA, may have a different number of host target binding sites in untranslated regions of a VGAM355 host target RNA, herein designated VGAM HOST TARGET RNA. It is further appreciated that while FIG. 1 depicts host target binding sites in the 3UTR region, this is meant as an example only these host target binding sites may be located in the 3UTR region, the 5UTR region, or in both 3UTR and 5UTR regions.

[4931] The complementary binding of VGAM355 RNA, herein designated VGAM RNA, to host target binding sites on VGAM355 host target RNA, herein designated VGAM HOST TARGET RNA, such as BINDING SITE I, BINDING SITE II and BINDING SITE III, inhibits translation of VGAM355 host target RNA, herein designated VGAM HOST TARGET RNA, into VGAM355 host target protein, herein designated VGAM HOST TARGET PROTEIN. VGAM host target protein is therefore outlined by a broken line.

[4932] It is appreciated that VGAM355 host target gene, herein designated VGAM HOST TARGET GENE, in fact represents a plurality of VGAM355 host target genes. The mRNA of each one of this plurality of VGAM355 host target genes comprises one or more host target binding sites, each having a nucleotide sequence which is at least partly complementary to VGAM355 RNA, herein designated VGAM RNA, and which when bound by VGAM355 RNA, herein designated VGAM RNA, causes inhibition of translation of respective one or more VGAM355 host target proteins.

[4933] It is further appreciated by one skilled in the art that the mode of translational inhibition illustrated by FIG. 1 with specific reference to translational inhibition exerted by VGAM355 gene, herein designated VGAM GENE, on one or more VGAM355 host target gene, herein designated VGAM HOST TARGET GENE, is in fact common to other known non-viral miRNA genes. As mentioned hereinabove with reference to the background section, although a specific complementary binding site has been demonstrated only for some of the known miRNA genes (primarily Lin-4 and Let-7), all other recently discovered miRNA genes are also believed by those skilled in the art to modulate expression of other genes by complementary binding, although specific complementary binding sites of these other miRNA genes have not yet been found (Ruvkun G., Perspective: Glimpses of a tiny RNA world, Science 294, 779 (2001)).

[4934] It is yet further appreciated that a function of VGAM355 is inhibition of expression of host target genes, as part of a novel viral mechanism of attacking a host. Accordingly, utilities of VGAM355 include diagnosis, prevention and treatment of viral infection by Vaccinia virus. Specific functions, and accordingly utilities, of VGAM355 correlate with, and may be deduced from, the identity of the host target genes which VGAM355 binds and inhibits, and the function of these host target genes, as elaborated hereinbelow.

[4935] Nucleotide sequences of the VGAM355 precursor RNA, herein designated VGAM PRECURSOR RNA, and of the diced VGAM355 RNA, herein designated VGAM RNA, and a schematic representation of the secondary folding of VGAM355 folded precursor RNA, herein designated VGAM FOLDED PRECURSOR RNA, of VGAM355 are further described hereinbelow with reference to Table 1.

[4936] Nucleotide sequences of host target binding sites, such as BINDING SITE-I, BINDING SITE-II and BINDING SITE-III of FIG. 1, found on, and schematic representation of the complementarity of each of these host target binding sites to VGAM355 RNA, herein designated VGAM RNA, are described hereinbelow with reference to Table 2.

[4937] FIG. 1 further provides a conceptual description of another novel bioinformatically detected viral gene of the present invention, referred to here as Viral Genomic Address Messenger 356 (VGAM356) viral gene, which modulates expression of respective host target genes thereof, the function and utility of which host target genes is known in the art.

[4938] VGAM356 is a novel bioinformatically detected regulatory, non protein coding, viral micro RNA (miRNA) gene. The method by which VGAM356 was detected is described hereinabove with reference to FIGS. 2-8.

[4939] VGAM356 gene, herein designated VGAM GENE, is a viral gene contained in the genome of Vaccinia virus. VGAM356 host target gene, herein designated VGAM HOST TARGET GENE, is a human gene contained in the human genome.

[4940] VGAM356 gene, herein designated VGAM GENE, encodes a VGAM356 precursor RNA, herein designated VGAM PRECURSOR RNA. Similar to other miRNA genes, and unlike most ordinary genes, VGAM356 precursor RNA, herein designated VGAM PRECURSOR RNA, does not encode a protein. A nucleotide sequence identical or highly similar to the nucleotide sequence of VGAM356 precursor RNA is designated SEQ ID:342, and is provided hereinbelow with reference to the sequence listing part. Nucleotide sequence SEQ ID:342 is located at position 3573 relative to the genome of Vaccinia virus.

[4941] VGAM356 precursor RNA, herein designated VGAM PRECURSOR RNA, folds onto itself, forming VGAM356 folded precursor RNA, herein designated VGAM FOLDED PRECURSOR RNA, which has a two-dimensional hairpin structure. As is well known in the art, this hairpin structure, is typical of RNA encoded by miRNA genes, and is due to the fact that the nucleotide sequence of the first half of the RNA encoded by a miRNA gene is an accurate or partial inversed-reversed sequence of the nucleotide sequence of the second half thereof.

[4942] An enzyme complex designated DICER COMPLEX, dices the VGAM356 folded precursor RNA, herein designated VGAM FOLDED PRECURSOR RNA, into VGAM356 RNA, herein designated VGAM RNA, a single stranded ˜22 nt long RNA segment. As is known in the art, dicing of a hairpin structured RNA precursor product into a short ˜22 nt RNA segment is catalyzed by an enzyme complex comprising an enzyme called Dicer together with other necessary proteins. A probable (over 81%) nucleotide sequence of VGAM356 RNA is designated SEQ ID:691, and is provided hereinbelow with reference to the sequence listing part.

[4943] VGAM356 host target gene, herein designated VGAM HOST TARGET GENE, encodes a corresponding messenger RNA, VGAM356 host target RNA, herein designated VGAM HOST TARGET RNA. VGAM356 host target RNA, herein designated VGAM HOST TARGET RNA, comprises three regions, as is typical of mRNA of a protein coding gene: a 5 untranslated region, a protein coding region and a 3 untranslated region, designated 5UTR, PROTEIN CODING and 3UTR respectively.

[4944] VGAM356 RNA, herein designated VGAM RNA, binds complementarily to one or more host target binding sites located in untranslated regions of VGAM356 host target RNA, herein designated VGAM HOST TARGET RNA. This complementary binding is due to the fact that the nucleotide sequence of VGAM356 RNA, herein designated VGAM RNA, is an accurate or a partial inversed-reversed sequence of the nucleotide sequence of each of the host target binding sites. As an illustration, FIG. 1 shows 3 such host target binding sites, designated BINDING SITE I, BINDING SITE II and BINDING SITE III respectively. It is appreciated that the number of host target binding sites shown in FIG. 1 is meant as an illustration only, and is not meant to be limiting VGAM356 RNA, herein designated VGAM RNA, may have a different number of host target binding sites in untranslated regions of a VGAM356 host target RNA, herein designated VGAM HOST TARGET RNA. It is further appreciated that while FIG. 1 depicts host target binding sites in the 3UTR region, this is meant as an example only these host target binding sites may be located in the 3UTR region, the 5UTR region, or in both 3UTR and 5UTR regions.

[4945] The complementary binding of VGAM356 RNA, herein designated VGAM RNA, to host target binding sites on VGAM356 host target RNA, herein designated VGAM HOST TARGET RNA, such as BINDING SITE I, BINDING SITE II and BINDING SITE III, inhibits translation of VGAM356 host target RNA, herein designated VGAM HOST TARGET RNA, into VGAM356 host target protein, herein designated VGAM HOST TARGET PROTEIN. VGAM host target protein is therefore outlined by a broken line.

[4946] It is appreciated that VGAM356 host target gene, herein designated VGAM HOST TARGET GENE, in fact represents a plurality of VGAM356 host target genes. The mRNA of each one of this plurality of VGAM356 host target genes comprises one or more host target binding sites, each having a nucleotide sequence which is at least partly complementary to VGAM356 RNA, herein designated VGAM RNA, and which when bound by VGAM356 RNA, herein designated VGAM RNA, causes inhibition of translation of respective one or more VGAM356 host target proteins.

[4947] It is further appreciated by one skilled in the art that the mode of translational inhibition illustrated by FIG. 1 with specific reference to translational inhibition exerted by VGAM356 gene, herein designated VGAM GENE, on one or more VGAM356 host target gene, herein designated VGAM HOST TARGET GENE, is in fact common to other known non-viral miRNA genes. As mentioned hereinabove with reference to the background section, although a specific complementary binding site has been demonstrated only for some of the known miRNA genes (primarily Lin-4 and Let-7), all other recently discovered miRNA genes are also believed by those skilled in the art to modulate expression of other genes by complementary binding, although specific complementary binding sites of these other miRNA genes have not yet been found (Ruvkun G., Perspective: Glimpses of a tiny RNA world, Science 294, 779 (2001)).

[4948] It is yet further appreciated that a function of VGAM356 is inhibition of expression of host target genes, as part of a novel viral mechanism of attacking a host. Accordingly, utilities of VGAM356 include diagnosis, prevention and treatment of viral infection by Vaccinia virus. Specific functions, and accordingly utilities, of VGAM356 correlate with, and may be deduced from, the identity of the host target genes which VGAM356 binds and inhibits, and the function of these host target genes, as elaborated hereinbelow.

[4949] Nucleotide sequences of the VGAM356 precursor RNA, herein designated VGAM PRECURSOR RNA, and of the diced VGAM356 RNA, herein designated VGAM RNA, and a schematic representation of the secondary folding of VGAM356 folded precursor RNA, herein designated VGAM FOLDED PRECURSOR RNA, of VGAM356 are further described hereinbelow with reference to Table 1.

[4950] Nucleotide sequences of host target binding sites, such as BINDING SITE-I, BINDING SITE-II and BINDING SITE-III of FIG. 1, found on, and schematic representation of the complementarity of each of these host target binding sites to VGAM356 RNA, herein designated VGAM RNA, are described hereinbelow with reference to Table 2.

[4951] FIG. 1 further provides a conceptual description of another novel bioinformatically detected viral gene of the present invention, referred to here as Viral Genomic Address Messenger 357 (VGAM357) viral gene, which modulates expression of respective host target genes thereof, the function and utility of which host target genes is known in the art.

[4952] VGAM357 is a novel bioinformatically detected regulatory, non protein coding, viral micro RNA (miRNA) gene. The method by which VGAM357 was detected is described hereinabove with reference to FIGS. 2-8.

[4953] VGAM357 gene, herein designated VGAM GENE, is a viral gene contained in the genome of Vaccinia virus. VGAM357 host target gene, herein designated VGAM HOST TARGET GENE, is a human gene contained in the human genome.

[4954] VGAM357 gene, herein designated VGAM GENE, encodes a VGAM357 precursor RNA, herein designated VGAM PRECURSOR RNA. Similar to other miRNA genes, and unlike most ordinary genes, VGAM357 precursor RNA, herein designated VGAM PRECURSOR RNA, does not encode a protein. A nucleotide sequence identical or highly similar to the nucleotide sequence of VGAM357 precursor RNA is designated SEQ ID:343, and is provided hereinbelow with reference to the sequence listing part. Nucleotide sequence SEQ ID:343 is located at position 2870 relative to the genome of Vaccinia virus.

[4955] VGAM357 precursor RNA, herein designated VGAM PRECURSOR RNA, folds onto itself, forming VGAM357 folded precursor RNA, herein designated VGAM FOLDED PRECURSOR RNA, which has a two-dimensional hairpin structure. As is well known in the art, this hairpin structure, is typical of RNA encoded by miRNA genes, and is due to the fact that the nucleotide sequence of the first half of the RNA encoded by a miRNA gene is an accurate or partial inversed-reversed sequence of the nucleotide sequence of the second half thereof.

[4956] An enzyme complex designated DICER COMPLEX, dices the VGAM357 folded precursor RNA, herein designated VGAM FOLDED PRECURSOR RNA, into VGAM357 RNA, herein designated VGAM RNA, a single stranded ˜22 nt long RNA segment. As is known in the art, dicing of a hairpin structured RNA precursor product into a short ˜22 nt RNA segment is catalyzed by an enzyme complex comprising an enzyme called Dicer together with other necessary proteins. A probable (over 81%) nucleotide sequence of VGAM357 RNA is designated SEQ ID:692, and is provided hereinbelow with reference to the sequence listing part.

[4957] VGAM357 host target gene, herein designated VGAM HOST TARGET GENE, encodes a corresponding messenger RNA, VGAM357 host target RNA, herein designated VGAM HOST TARGET RNA. VGAM357 host target RNA, herein designated VGAM HOST TARGET RNA, comprises three regions, as is typical of mRNA of a protein coding gene: a 5 untranslated region, a protein coding region and a 3 untranslated region, designated 5UTR, PROTEIN CODING and 3UTR respectively.

[4958] VGAM357 RNA, herein designated VGAM RNA, binds complementarily to one or more host target binding sites located in untranslated regions of VGAM357 host target RNA, herein designated VGAM HOST TARGET RNA. This complementary binding is due to the fact that the nucleotide sequence of VGAM357 RNA, herein designated VGAM RNA, is an accurate or a partial inversed-reversed sequence of the nucleotide sequence of each of the host target binding sites. As an illustration, FIG. 1 shows 3 such host target binding sites, designated BINDING SITE I, BINDING SITE II and BINDING SITE III respectively. It is appreciated that the number of host target binding sites shown in FIG. 1 is meant as an illustration only, and is not meant to be limiting VGAM357 RNA, herein designated VGAM RNA, may have a different number of host target binding sites in untranslated regions of a VGAM357 host target RNA, herein designated VGAM HOST TARGET RNA. It is further appreciated that while FIG. 1 depicts host target binding sites in the 3UTR region, this is meant as an example only these host target binding sites may be located in the 3UTR region, the 5UTR region, or in both 3UTR and 5UTR regions.

[4959] The complementary binding of VGAM357 RNA, herein designated VGAM RNA, to host target binding sites on VGAM357 host target RNA, herein designated VGAM HOST TARGET RNA, such as BINDING SITE I, BINDING SITE II and BINDING SITE III, inhibits translation of VGAM357 host target RNA, herein designated VGAM HOST TARGET RNA, into VGAM357 host target protein, herein designated VGAM HOST TARGET PROTEIN. VGAM host target protein is therefore outlined by a broken line.

[4960] It is appreciated that VGAM357 host target gene, herein designated VGAM HOST TARGET GENE, in fact represents a plurality of VGAM357 host target genes. The mRNA of each one of this plurality of VGAM357 host target genes comprises one or more host target binding sites, each having a nucleotide sequence which is at least partly complementary to VGAM357 RNA, herein designated VGAM RNA, and which when bound by VGAM357 RNA, herein designated VGAM RNA, causes inhibition of translation of respective one or more VGAM357 host target proteins.

[4961] It is further appreciated by one skilled in the art that the mode of translational inhibition illustrated by FIG. 1 with specific reference to translational inhibition exerted by VGAM357 gene, herein designated VGAM GENE, on one or more VGAM357 host target gene, herein designated VGAM HOST TARGET GENE, is in fact common to other known non-viral miRNA genes. As mentioned hereinabove with reference to the background section, although a specific complementary binding site has been demonstrated only for some of the known miRNA genes (primarily Lin-4 and Let-7), all other recently discovered miRNA genes are also believed by those skilled in the art to modulate expression of other genes by complementary binding, although specific complementary binding sites of these other miRNA genes have not yet been found (Ruvkun G., Perspective: Glimpses of a tiny RNA world, Science 294, 779 (2001)).

[4962] It is yet further appreciated that a function of VGAM357 is inhibition of expression of host target genes, as part of a novel viral mechanism of attacking a host. Accordingly, utilities of VGAM357 include diagnosis, prevention and treatment of viral infection by Vaccinia virus. Specific functions, and accordingly utilities, of VGAM357 correlate with, and may be deduced from, the identity of the host target genes which VGAM357 binds and inhibits, and the function of these host target genes, as elaborated hereinbelow.

[4963] Nucleotide sequences of the VGAM357 precursor RNA, herein designated VGAM PRECURSOR RNA, and of the diced VGAM357 RNA, herein designated VGAM RNA, and a schematic representation of the secondary folding of VGAM357 folded precursor RNA, herein designated VGAM FOLDED PRECURSOR RNA, of VGAM357 are further described hereinbelow with reference to Table 1.

[4964] Nucleotide sequences of host target binding sites, such as BINDING SITE-I, BINDING SITE-II and BINDING SITE-III of FIG. 1, found on, and schematic representation of the complementarity of each of these host target binding sites to VGAM357 RNA, herein designated VGAM RNA, are described hereinbelow with reference to Table 2.

[4965] FIG. 1 further provides a conceptual description of another novel bioinformatically detected viral gene of the present invention, referred to here as Viral Genomic Address Messenger 358 (VGAM358) viral gene, which modulates expression of respective host target genes thereof, the function and utility of which host target genes is known in the art.

[4966] VGAM358 is a novel bioinformatically detected regulatory, non protein coding, viral micro RNA (miRNA) gene. The method by which VGAM358 was detected is described hereinabove with reference to FIGS. 2-8.

[4967] VGAM358 gene, herein designated VGAM GENE, is a viral gene contained in the genome of Vaccinia virus. VGAM358 host target gene, herein designated VGAM HOST TARGET GENE, is a human gene contained in the human genome.

[4968] VGAM358 gene, herein designated VGAM GENE, encodes a VGAM358 precursor RNA, herein designated VGAM PRECURSOR RNA. Similar to other miRNA genes, and unlike most ordinary genes, VGAM358 precursor RNA, herein designated VGAM PRECURSOR RNA, does not encode a protein. A nucleotide sequence identical or highly similar to the nucleotide sequence of VGAM358 precursor RNA is designated SEQ ID:344, and is provided hereinbelow with reference to the sequence listing part. Nucleotide sequence SEQ ID:344 is located at position 151547 relative to the genome of Vaccinia virus.

[4969] VGAM358 precursor RNA, herein designated VGAM PRECURSOR RNA, folds onto itself, forming VGAM358 folded precursor RNA, herein designated VGAM FOLDED PRECURSOR RNA, which has a two-dimensional hairpin structure. As is well known in the art, this hairpin structure, is typical of RNA encoded by miRNA genes, and is due to the fact that the nucleotide sequence of the first half of the RNA encoded by a miRNA gene is an accurate or partial inversed-reversed sequence of the nucleotide sequence of the second half thereof.

[4970] An enzyme complex designated DICER COMPLEX, dices the VGAM358 folded precursor RNA, herein designated VGAM FOLDED PRECURSOR RNA, into VGAM358 RNA, herein designated VGAM RNA, a single stranded ˜22 nt long RNA segment. As is known in the art, dicing of a hairpin structured RNA precursor product into a short ˜22 nt RNA segment is catalyzed by an enzyme complex comprising an enzyme called Dicer together with other necessary proteins. A probable (over 92%) nucleotide sequence of VGAM358 RNA is designated SEQ ID:693, and is provided hereinbelow with reference to the sequence listing part.

[4971] VGAM358 host target gene, herein designated VGAM HOST TARGET GENE, encodes a corresponding messenger RNA, VGAM358 host target RNA, herein designated VGAM HOST TARGET RNA. VGAM358 host target RNA, herein designated VGAM HOST TARGET RNA, comprises three regions, as is typical of mRNA of a protein coding gene: a 5 untranslated region, a protein coding region and a 3 untranslated region, designated 5UTR, PROTEIN CODING and 3UTR respectively.

[4972] VGAM358 RNA, herein designated VGAM RNA, binds complementarily to one or more host target binding sites located in untranslated regions of VGAM358 host target RNA, herein designated VGAM HOST TARGET RNA. This complementary binding is due to the fact that the nucleotide sequence of VGAM358 RNA, herein designated VGAM RNA, is an accurate or a partial inversed-reversed sequence of the nucleotide sequence of each of the host target binding sites. As an illustration, FIG. 1 shows 3 such host target binding sites, designated BINDING SITE I, BINDING SITE II and BINDING SITE III respectively. It is appreciated that the number of host target binding sites shown in FIG. 1 is meant as an illustration only, and is not meant to be limiting VGAM358 RNA, herein designated VGAM RNA, may have a different number of host target binding sites in untranslated regions of a VGAM358 host target RNA, herein designated VGAM HOST TARGET RNA. It is further appreciated that while FIG. 1 depicts host target binding sites in the 3UTR region, this is meant as an example only these host target binding sites may be located in the 3UTR region, the 5UTR region, or in both 3UTR and 5UTR regions.

[4973] The complementary binding of VGAM358 RNA, herein designated VGAM RNA, to host target binding sites on VGAM358 host target RNA, herein designated VGAM HOST TARGET RNA, such as BINDING SITE I, BINDING SITE II and BINDING SITE III, inhibits translation of VGAM358 host target RNA, herein designated VGAM HOST TARGET RNA, into VGAM358 host target protein, herein designated VGAM HOST TARGET PROTEIN. VGAM host target protein is therefore outlined by a broken line.

[4974] It is appreciated that VGAM358 host target gene, herein designated VGAM HOST TARGET GENE, in fact represents a plurality of VGAM358 host target genes. The mRNA of each one of this plurality of VGAM358 host target genes comprises one or more host target binding sites, each having a nucleotide sequence which is at least partly complementary to VGAM358 RNA, herein designated VGAM RNA, and which when bound by VGAM358 RNA, herein designated VGAM RNA, causes inhibition of translation of respective one or more VGAM358 host target proteins.

[4975] It is further appreciated by one skilled in the art that the mode of translational inhibition illustrated by FIG. 1 with specific reference to translational inhibition exerted by VGAM358 gene, herein designated VGAM GENE, on one or more VGAM358 host target gene, herein designated VGAM HOST TARGET GENE, is in fact common to other known non-viral miRNA genes. As mentioned hereinabove with reference to the background section, although a specific complementary binding site has been demonstrated only for some of the known miRNA genes (primarily Lin-4 and Let-7), all other recently discovered miRNA genes are also believed by those skilled in the art to modulate expression of other genes by complementary binding, although specific complementary binding sites of these other miRNA genes have not yet been found (Ruvkun G., Perspective: Glimpses of a tiny RNA world, Science 294, 779 (2001)).

[4976] It is yet further appreciated that a function of VGAM358 is inhibition of expression of host target genes, as part of a novel viral mechanism of attacking a host. Accordingly, utilities of VGAM358 include diagnosis, prevention and treatment of viral infection by Vaccinia virus. Specific functions, and accordingly utilities, of VGAM358 correlate with, and may be deduced from, the identity of the host target genes which VGAM358 binds and inhibits, and the function of these host target genes, as elaborated hereinbelow.

[4977] Nucleotide sequences of the VGAM358 precursor RNA, herein designated VGAM PRECURSOR RNA, and of the diced VGAM358 RNA, herein designated VGAM RNA, and a schematic representation of the secondary folding of VGAM358 folded precursor RNA, herein designated VGAM FOLDED PRECURSOR RNA, of VGAM358 are further described hereinbelow with reference to Table 1.

[4978] Nucleotide sequences of host target binding sites, such as BINDING SITE-I, BINDING SITE-II and BINDING SITE-III of FIG. 1, found on, and schematic representation of the complementarity of each of these host target binding sites to VGAM358 RNA, herein designated VGAM RNA, are described hereinbelow with reference to Table 2.

[4979] FIG. 1 further provides a conceptual description of another novel bioinformatically detected viral gene of the present invention, referred to here as Viral Genomic Address Messenger 359 (VGAM359) viral gene, which modulates expression of respective host target genes thereof, the function and utility of which host target genes is known in the art.

[4980] VGAM359 is a novel bioinformatically detected regulatory, non protein coding, viral micro RNA (miRNA) gene. The method by which VGAM359 was detected is described hereinabove with reference to FIGS. 2-8.

[4981] VGAM359 gene, herein designated VGAM GENE, is a viral gene contained in the genome of Vaccinia virus. VGAM359 host target gene, herein designated VGAM HOST TARGET GENE, is a human gene contained in the human genome.

[4982] VGAM359 gene, herein designated VGAM GENE, encodes a VGAM359 precursor RNA, herein designated VGAM PRECURSOR RNA. Similar to other miRNA genes, and unlike most ordinary genes, VGAM359 precursor RNA, herein designated VGAM PRECURSOR RNA, does not encode a protein. A nucleotide sequence identical or highly similar to the nucleotide sequence of VGAM359 precursor RNA is designated SEQ ID:345, and is provided hereinbelow with reference to the sequence listing part. Nucleotide sequence SEQ ID:345 is located at position 151270 relative to the genome of Vaccinia virus.

[4983] VGAM359 precursor RNA, herein designated VGAM PRECURSOR RNA, folds onto itself, forming VGAM359 folded precursor RNA, herein designated VGAM FOLDED PRECURSOR RNA, which has a two-dimensional hairpin structure. As is well known in the art, this hairpin structure, is typical of RNA encoded by miRNA genes, and is due to the fact that the nucleotide sequence of the first half of the RNA encoded by a miRNA gene is an accurate or partial inversed-reversed sequence of the nucleotide sequence of the second half thereof.

[4984] An enzyme complex designated DICER COMPLEX, dices the VGAM359 folded precursor RNA, herein designated VGAM FOLDED PRECURSOR RNA, into VGAM359 RNA, herein designated VGAM RNA, a single stranded ˜22 nt long RNA segment. As is known in the art, dicing of a hairpin structured RNA precursor product into a short ˜22 nt RNA segment is catalyzed by an enzyme complex comprising an enzyme called Dicer together with other necessary proteins. A probable (over 84%) nucleotide sequence of VGAM359 RNA is designated SEQ ID:694, and is provided hereinbelow with reference to the sequence listing part.

[4985] VGAM359 host target gene, herein designated VGAM HOST TARGET GENE, encodes a corresponding messenger RNA, VGAM359 host target RNA, herein designated VGAM HOST TARGET RNA. VGAM359 host target RNA, herein designated VGAM HOST TARGET RNA, comprises three regions, as is typical of mRNA of a protein coding gene: a 5 untranslated region, a protein coding region and a 3 untranslated region, designated 5UTR, PROTEIN CODING and 3UTR respectively.

[4986] VGAM359 RNA, herein designated VGAM RNA, binds complementarily to one or more host target binding sites located in untranslated regions of VGAM359 host target RNA, herein designated VGAM HOST TARGET RNA. This complementary binding is due to the fact that the nucleotide sequence of VGAM359 RNA, herein designated VGAM RNA, is an accurate or a partial inversed-reversed sequence of the nucleotide sequence of each of the host target binding sites. As an illustration, FIG. 1 shows 3 such host target binding sites, designated BINDING SITE I, BINDING SITE II and BINDING SITE III respectively. It is appreciated that the number of host target binding sites shown in FIG. 1 is meant as an illustration only, and is not meant to be limiting VGAM359 RNA, herein designated VGAM RNA, may have a different number of host target binding sites in untranslated regions of a VGAM359 host target RNA, herein designated VGAM HOST TARGET RNA. It is further appreciated that while FIG. 1 depicts host target binding sites in the 3UTR region, this is meant as an example only these host target binding sites may be located in the 3UTR region, the 5UTR region, or in both 3UTR and 5UTR regions.

[4987] The complementary binding of VGAM359 RNA, herein designated VGAM RNA, to host target binding sites on VGAM359 host target RNA, herein designated VGAM HOST TARGET RNA, such as BINDING SITE I, BINDING SITE II and BINDING SITE III, inhibits translation of VGAM359 host target RNA, herein designated VGAM HOST TARGET RNA, into VGAM359 host target protein, herein designated VGAM HOST TARGET PROTEIN. VGAM host target protein is therefore outlined by a broken line.

[4988] It is appreciated that VGAM359 host target gene, herein designated VGAM HOST TARGET GENE, in fact represents a plurality of VGAM359 host target genes. The mRNA of each one of this plurality of VGAM359 host target genes comprises one or more host target binding sites, each having a nucleotide sequence which is at least partly complementary to VGAM359 RNA, herein designated VGAM RNA, and which when bound by VGAM359 RNA, herein designated VGAM RNA, causes inhibition of translation of respective one or more VGAM359 host target proteins.

[4989] It is further appreciated by one skilled in the art that the mode of translational inhibition illustrated by FIG. 1 with specific reference to translational inhibition exerted by VGAM359 gene, herein designated VGAM GENE, on one or more VGAM359 host target gene, herein designated VGAM HOST TARGET GENE, is in fact common to other known non-viral miRNA genes. As mentioned hereinabove with reference to the background section, although a specific complementary binding site has been demonstrated only for some of the known miRNA genes (primarily Lin-4 and Let-7), all other recently discovered miRNA genes are also believed by those skilled in the art to modulate expression of other genes by complementary binding, although specific complementary binding sites of these other miRNA genes have not yet been found (Ruvkun G., Perspective: Glimpses of a tiny RNA world, Science 294, 779 (2001)).

[4990] It is yet further appreciated that a function of VGAM359 is inhibition of expression of host target genes, as part of a novel viral mechanism of attacking a host. Accordingly, utilities of VGAM359 include diagnosis, prevention and treatment of viral infection by Vaccinia virus. Specific functions, and accordingly utilities, of VGAM359 correlate with, and may be deduced from, the identity of the host target genes which VGAM359 binds and inhibits, and the function of these host target genes, as elaborated hereinbelow.

[4991] Nucleotide sequences of the VGAM359 precursor RNA, herein designated VGAM PRECURSOR RNA, and of the diced VGAM359 RNA, herein designated VGAM RNA, and a schematic representation of the secondary folding of VGAM359 folded precursor RNA, herein designated VGAM FOLDED PRECURSOR RNA, of VGAM359 are further described hereinbelow with reference to Table 1.

[4992] Nucleotide sequences of host target binding sites, such as BINDING SITE-I, BINDING SITE-II and BINDING SITE-III of FIG. 1, found on, and schematic representation of the complementarity of each of these host target binding sites to VGAM359 RNA, herein designated VGAM RNA, are described hereinbelow with reference to Table 2.

[4993] FIG. 1 further provides a conceptual description of another novel bioinformatically detected viral gene of the present invention, referred to here as Viral Genomic Address Messenger 360 (VGAM360) viral gene, which modulates expression of respective host target genes thereof, the function and utility of which host target genes is known in the art.

[4994] VGAM360 is a novel bioinformatically detected regulatory, non protein coding, viral micro RNA (miRNA) gene. The method by which VGAM360 was detected is described hereinabove with reference to FIGS. 2-8.

[4995] VGAM360 gene, herein designated VGAM GENE, is a viral gene contained in the genome of Vaccinia virus. VGAM360 host target gene, herein designated VGAM HOST TARGET GENE, is a human gene contained in the human genome.

[4996] VGAM360 gene, herein designated VGAM GENE, encodes a VGAM360 precursor RNA, herein designated VGAM PRECURSOR RNA. Similar to other miRNA genes, and unlike most ordinary genes, VGAM360 precursor RNA, herein designated VGAM PRECURSOR RNA, does not encode a protein. A nucleotide sequence identical or highly similar to the nucleotide sequence of VGAM360 precursor RNA is designated SEQ ID:346, and is provided hereinbelow with reference to the sequence listing part. Nucleotide sequence SEQ ID:346 is located at position 180452 relative to the genome of Vaccinia virus.

[4997] VGAM360 precursor RNA, herein designated VGAM PRECURSOR RNA, folds onto itself, forming VGAM360 folded precursor RNA, herein designated VGAM FOLDED PRECURSOR RNA, which has a two-dimensional hairpin structure. As is well known in the art, this hairpin structure, is typical of RNA encoded by miRNA genes, and is due to the fact that the nucleotide sequence of the first half of the RNA encoded by a miRNA gene is an accurate or partial inversed-reversed sequence of the nucleotide sequence of the second half thereof.

[4998] An enzyme complex designated DICER COMPLEX, dices the VGAM360 folded precursor RNA, herein designated VGAM FOLDED PRECURSOR RNA, into VGAM360 RNA, herein designated VGAM RNA, a single stranded ˜22 nt long RNA segment. As is known in the art, dicing of a hairpin structured RNA precursor product into a short ˜22 nt RNA segment is catalyzed by an enzyme complex comprising an enzyme called Dicer together with other necessary proteins. A probable (over 85%) nucleotide sequence of VGAM360 RNA is designated SEQ ID:695, and is provided hereinbelow with reference to the sequence listing part.

[4999] VGAM360 host target gene, herein designated VGAM HOST TARGET GENE, encodes a corresponding messenger RNA, VGAM360 host target RNA, herein designated VGAM HOST TARGET RNA. VGAM360 host target RNA, herein designated VGAM HOST TARGET RNA, comprises three regions, as is typical of mRNA of a protein coding gene: a 5 untranslated region, a protein coding region and a 3 untranslated region, designated 5UTR, PROTEIN CODING and 3UTR respectively.

[5000] VGAM360 RNA, herein designated VGAM RNA, binds complementarily to one or more host target binding sites located in untranslated regions of VGAM360 host target RNA, herein designated VGAM HOST TARGET RNA. This complementary binding is due to the fact that the nucleotide sequence of VGAM360 RNA, herein designated VGAM RNA, is an accurate or a partial inversed-reversed sequence of the nucleotide sequence of each of the host target binding sites. As an illustration, FIG. 1 shows 3 such host target binding sites, designated BINDING SITE I, BINDING SITE II and BINDING SITE III respectively. It is appreciated that the number of host target binding sites shown in FIG. 1 is meant as an illustration only, and is not meant to be limiting VGAM360 RNA, herein designated VGAM RNA, may have a different number of host target binding sites in untranslated regions of a VGAM360 host target RNA, herein designated VGAM HOST TARGET RNA. It is further appreciated that while FIG. 1 depicts host target binding sites in the 3UTR region, this is meant as an example only these host target binding sites may be located in the 3UTR region, the 5UTR region, or in both 3UTR and 5UTR regions.

[5001] The complementary binding of VGAM360 RNA, herein designated VGAM RNA, to host target binding sites on VGAM360 host target RNA, herein designated VGAM HOST TARGET RNA, such as BINDING SITE I, BINDING SITE II and BINDING SITE III, inhibits translation of VGAM360 host target RNA, herein designated VGAM HOST TARGET RNA, into VGAM360 host target protein, herein designated VGAM HOST TARGET PROTEIN. VGAM host target protein is therefore outlined by a broken line.

[5002] It is appreciated that VGAM360 host target gene, herein designated VGAM HOST TARGET GENE, in fact represents a plurality of VGAM360 host target genes. The mRNA of each one of this plurality of VGAM360 host target genes comprises one or more host target binding sites, each having a nucleotide sequence which is at least partly complementary to VGAM360 RNA, herein designated VGAM RNA, and which when bound by VGAM360 RNA, herein designated VGAM RNA, causes inhibition of translation of respective one or more VGAM360 host target proteins.

[5003] It is further appreciated by one skilled in the art that the mode of translational inhibition illustrated by FIG. 1 with specific reference to translational inhibition exerted by VGAM360 gene, herein designated VGAM GENE, on one or more VGAM360 host target gene, herein designated VGAM HOST TARGET GENE, is in fact common to other known non-viral miRNA genes. As mentioned hereinabove with reference to the background section, although a specific complementary binding site has been demonstrated only for some of the known miRNA genes (primarily Lin-4 and Let-7), all other recently discovered miRNA genes are also believed by those skilled in the art to modulate expression of other genes by complementary binding, although specific complementary binding sites of these other miRNA genes have not yet been found (Ruvkun G., Perspective: Glimpses of a tiny RNA world, Science 294, 779 (2001)).

[5004] It is yet further appreciated that a function of VGAM360 is inhibition of expression of host target genes, as part of a novel viral mechanism of attacking a host. Accordingly, utilities of VGAM360 include diagnosis, prevention and treatment of viral infection by Vaccinia virus. Specific functions, and accordingly utilities, of VGAM360 correlate with, and may be deduced from, the identity of the host target genes which VGAM360 binds and inhibits, and the function of these host target genes, as elaborated hereinbelow.

[5005] Nucleotide sequences of the VGAM360 precursor RNA, herein designated VGAM PRECURSOR RNA, and of the diced VGAM360 RNA, herein designated VGAM RNA, and a schematic representation of the secondary folding of VGAM360 folded precursor RNA, herein designated VGAM FOLDED PRECURSOR RNA, of VGAM360 are further described hereinbelow with reference to Table 1.

[5006] Nucleotide sequences of host target binding sites, such as BINDING SITE-I, BINDING SITE-II and BINDING SITE-III of FIG. 1, found on, and schematic representation of the complementarity of each of these host target binding sites to VGAM360 RNA, herein designated VGAM RNA, are described hereinbelow with reference to Table 2.

[5007] FIG. 1 further provides a conceptual description of another novel bioinformatically detected viral gene of the present invention, referred to here as Viral Genomic Address Messenger 361 (VGAM361) viral gene, which modulates expression of respective host target genes thereof, the function and utility of which host target genes is known in the art.

[5008] VGAM361 is a novel bioinformatically detected regulatory, non protein coding, viral micro RNA (miRNA) gene. The method by which VGAM361 was detected is described hereinabove with reference to FIGS. 2-8.

[5009] VGAM361 gene, herein designated VGAM GENE, is a viral gene contained in the genome of Vaccinia virus. VGAM361 host target gene, herein designated VGAM HOST TARGET GENE, is a human gene contained in the human genome.

[5010] VGAM361 gene, herein designated VGAM GENE, encodes a VGAM361 precursor RNA, herein designated VGAM PRECURSOR RNA. Similar to other miRNA genes, and unlike most ordinary genes, VGAM361 precursor RNA, herein designated VGAM PRECURSOR RNA, does not encode a protein. A nucleotide sequence identical or highly similar to the nucleotide sequence of VGAM361 precursor RNA is designated SEQ ID:347, and is provided hereinbelow with reference to the sequence listing part. Nucleotide sequence SEQ ID:347 is located at position 183817 relative to the genome of Vaccinia virus.

[5011] VGAM361 precursor RNA, herein designated VGAM PRECURSOR RNA, folds onto itself, forming VGAM361 folded precursor RNA, herein designated VGAM FOLDED PRECURSOR RNA, which has a two-dimensional hairpin structure. As is well known in the art, this hairpin structure, is typical of RNA encoded by miRNA genes, and is due to the fact that the nucleotide sequence of the first half of the RNA encoded by a miRNA gene is an accurate or partial inversed-reversed sequence of the nucleotide sequence of the second half thereof.

[5012] An enzyme complex designated DICER COMPLEX, dices the VGAM361 folded precursor RNA, herein designated VGAM FOLDED PRECURSOR RNA, into VGAM361 RNA, herein designated VGAM RNA, a single stranded ˜22 nt long RNA segment. As is known in the art, dicing of a hairpin structured RNA precursor product into a short ˜22 nt RNA segment is catalyzed by an enzyme complex comprising an enzyme called Dicer together with other necessary proteins. A probable (over 80%) nucleotide sequence of VGAM361 RNA is designated SEQ ID:696, and is provided hereinbelow with reference to the sequence listing part.

[5013] VGAM361 host target gene, herein designated VGAM HOST TARGET GENE, encodes a corresponding messenger RNA, VGAM361 host target RNA, herein designated VGAM HOST TARGET RNA. VGAM361 host target RNA, herein designated VGAM HOST TARGET RNA, comprises three regions, as is typical of mRNA of a protein coding gene: a 5 untranslated region, a protein coding region and a 3 untranslated region, designated 5UTR, PROTEIN CODING and 3UTR respectively.

[5014] VGAM361 RNA, herein designated VGAM RNA, binds complementarily to one or more host target binding sites located in untranslated regions of VGAM361 host target RNA, herein designated VGAM HOST TARGET RNA. This complementary binding is due to the fact that the nucleotide sequence of VGAM361 RNA, herein designated VGAM RNA, is an accurate or a partial inversed-reversed sequence of the nucleotide sequence of each of the host target binding sites. As an illustration, FIG. 1 shows 3 such host target binding sites, designated BINDING SITE I, BINDING SITE II and BINDING SITE III respectively. It is appreciated that the number of host target binding sites shown in FIG. 1 is meant as an illustration only, and is not meant to be limiting VGAM361 RNA, herein designated VGAM RNA, may have a different number of host target binding sites in untranslated regions of a VGAM361 host target RNA, herein designated VGAM HOST TARGET RNA. It is further appreciated that while FIG. 1 depicts host target binding sites in the 3UTR region, this is meant as an example only these host target binding sites may be located in the 3UTR region, the 5UTR region, or in both 3UTR and 5UTR regions.

[5015] The complementary binding of VGAM361 RNA, herein designated VGAM RNA, to host target binding sites on VGAM361 host target RNA, herein designated VGAM HOST TARGET RNA, such as BINDING SITE I, BINDING SITE II and BINDING SITE III, inhibits translation of VGAM361 host target RNA, herein designated VGAM HOST TARGET RNA, into VGAM361 host target protein, herein designated VGAM HOST TARGET PROTEIN. VGAM host target protein is therefore outlined by a broken line.

[5016] It is appreciated that VGAM361 host target gene, herein designated VGAM HOST TARGET GENE, in fact represents a plurality of VGAM361 host target genes. The mRNA of each one of this plurality of VGAM361 host target genes comprises one or more host target binding sites, each having a nucleotide sequence which is at least partly complementary to VGAM361 RNA, herein designated VGAM RNA, and which when bound by VGAM361 RNA, herein designated VGAM RNA, causes inhibition of translation of respective one or more VGAM361 host target proteins.

[5017] It is further appreciated by one skilled in the art that the mode of translational inhibition illustrated by FIG. 1 with specific reference to translational inhibition exerted by VGAM361 gene, herein designated VGAM GENE, on one or more VGAM361 host target gene, herein designated VGAM HOST TARGET GENE, is in fact common to other known non-viral miRNA genes. As mentioned hereinabove with reference to the background section, although a specific complementary binding site has been demonstrated only for some of the known miRNA genes (primarily Lin-4 and Let-7), all other recently discovered miRNA genes are also believed by those skilled in the art to modulate expression of other genes by complementary binding, although specific complementary binding sites of these other miRNA genes have not yet been found (Ruvkun G., Perspective: Glimpses of a tiny RNA world, Science 294, 779 (2001)).

[5018] It is yet further appreciated that a function of VGAM361 is inhibition of expression of host target genes, as part of a novel viral mechanism of attacking a host. Accordingly, utilities of VGAM361 include diagnosis, prevention and treatment of viral infection by Vaccinia virus. Specific functions, and accordingly utilities, of VGAM361 correlate with, and may be deduced from, the identity of the host target genes which VGAM361 binds and inhibits, and the function of these host target genes, as elaborated hereinbelow.

[5019] Nucleotide sequences of the VGAM361 precursor RNA, herein designated VGAM PRECURSOR RNA, and of the diced VGAM361 RNA, herein designated VGAM RNA, and a schematic representation of the secondary folding of VGAM361 folded precursor RNA, herein designated VGAM FOLDED PRECURSOR RNA, of VGAM361 are further described hereinbelow with reference to Table 1.

[5020] Nucleotide sequences of host target binding sites, such as BINDING SITE-I, BINDING SITE-II and BINDING SITE-III of FIG. 1, found on, and schematic representation of the complementarity of each of these host target binding sites to VGAM361 RNA, herein designated VGAM RNA, are described hereinbelow with reference to Table 2.

[5021] FIG. 1 further provides a conceptual description of another novel bioinformatically detected viral gene of the present invention, referred to here as Viral Genomic Address Messenger 362 (VGAM362) viral gene, which modulates expression of respective host target genes thereof, the function and utility of which host target genes is known in the art.

[5022] VGAM362 is a novel bioinformatically detected regulatory, non protein coding, viral micro RNA (miRNA) gene. The method by which VGAM362 was detected is described hereinabove with reference to FIGS. 2-8.

[5023] VGAM362 gene, herein designated VGAM GENE, is a viral gene contained in the genome of Vaccinia virus. VGAM362 host target gene, herein designated VGAM HOST TARGET GENE, is a human gene contained in the human genome.

[5024] VGAM362 gene, herein designated VGAM GENE, encodes a VGAM362 precursor RNA, herein designated VGAM PRECURSOR RNA. Similar to other miRNA genes, and unlike most ordinary genes, VGAM362 precursor RNA, herein designated VGAM PRECURSOR RNA, does not encode a protein. A nucleotide sequence identical or highly similar to the nucleotide sequence of VGAM362 precursor RNA is designated SEQ ID:348, and is provided hereinbelow with reference to the sequence listing part. Nucleotide sequence SEQ ID:348 is located at position 183735 relative to the genome of Vaccinia virus.

[5025] VGAM362 precursor RNA, herein designated VGAM PRECURSOR RNA, folds onto itself, forming VGAM362 folded precursor RNA, herein designated VGAM FOLDED PRECURSOR RNA, which has a two-dimensional hairpin structure. As is well known in the art, this hairpin structure, is typical of RNA encoded by miRNA genes, and is due to the fact that the nucleotide sequence of the first half of the RNA encoded by a miRNA gene is an accurate or partial inversed-reversed sequence of the nucleotide sequence of the second half thereof.

[5026] An enzyme complex designated DICER COMPLEX, dices the VGAM362 folded precursor RNA, herein designated VGAM FOLDED PRECURSOR RNA, into VGAM362 RNA, herein designated VGAM RNA, a single stranded ˜22 nt long RNA segment. As is known in the art, dicing of a hairpin structured RNA precursor product into a short ˜22 nt RNA segment is catalyzed by an enzyme complex comprising an enzyme called Dicer together with other necessary proteins. A probable (over 71%) nucleotide sequence of VGAM362 RNA is designated SEQ ID:697, and is provided hereinbelow with reference to the sequence listing part.

[5027] VGAM362 host target gene, herein designated VGAM HOST TARGET GENE, encodes a corresponding messenger RNA, VGAM362 host target RNA, herein designated VGAM HOST TARGET RNA. VGAM362 host target RNA, herein designated VGAM HOST TARGET RNA, comprises three regions, as is typical of mRNA of a protein coding gene: a 5 untranslated region, a protein coding region and a 3 untranslated region, designated 5UTR, PROTEIN CODING and 3UTR respectively.

[5028] VGAM362 RNA, herein designated VGAM RNA, binds complementarily to one or more host target binding sites located in untranslated regions of VGAM362 host target RNA, herein designated VGAM HOST TARGET RNA. This complementary binding is due to the fact that the nucleotide sequence of VGAM362 RNA, herein designated VGAM RNA, is an accurate or a partial inversed-reversed sequence of the nucleotide sequence of each of the host target binding sites. As an illustration, FIG. 1 shows 3 such host target binding sites, designated BINDING SITE I, BINDING SITE II and BINDING SITE III respectively. It is appreciated that the number of host target binding sites shown in FIG. 1 is meant as an illustration only, and is not meant to be limiting VGAM362 RNA, herein designated VGAM RNA, may have a different number of host target binding sites in untranslated regions of a VGAM362 host target RNA, herein designated VGAM HOST TARGET RNA. It is further appreciated that while FIG. 1 depicts host target binding sites in the 3UTR region, this is meant as an example only these host target binding sites may be located in the 3UTR region, the 5UTR region, or in both 3UTR and 5UTR regions.

[5029] The complementary binding of VGAM362 RNA, herein designated VGAM RNA, to host target binding sites on VGAM362 host target RNA, herein designated VGAM HOST TARGET RNA, such as BINDING SITE I, BINDING SITE II and BINDING SITE III, inhibits translation of VGAM362 host target RNA, herein designated VGAM HOST TARGET RNA, into VGAM362 host target protein, herein designated VGAM HOST TARGET PROTEIN. VGAM host target protein is therefore outlined by a broken line.

[5030] It is appreciated that VGAM362 host target gene, herein designated VGAM HOST TARGET GENE, in fact represents a plurality of VGAM362 host target genes. The mRNA of each one of this plurality of VGAM362 host target genes comprises one or more host target binding sites, each having a nucleotide sequence which is at least partly complementary to VGAM362 RNA, herein designated VGAM RNA, and which when bound by VGAM362 RNA, herein designated VGAM RNA, causes inhibition of translation of respective one or more VGAM362 host target proteins.

[5031] It is further appreciated by one skilled in the art that the mode of translational inhibition illustrated by FIG. 1 with specific reference to translational inhibition exerted by VGAM362 gene, herein designated VGAM GENE, on one or more VGAM362 host target gene, herein designated VGAM HOST TARGET GENE, is in fact common to other known non-viral miRNA genes. As mentioned hereinabove with reference to the background section, although a specific complementary binding site has been demonstrated only for some of the known miRNA genes (primarily Lin-4 and Let-7), all other recently discovered miRNA genes are also believed by those skilled in the art to modulate expression of other genes by complementary binding, although specific complementary binding sites of these other miRNA genes have not yet been found (Ruvkun G., Perspective: Glimpses of a tiny RNA world, Science 294, 779 (2001)).

[5032] It is yet further appreciated that a function of VGAM362 is inhibition of expression of host target genes, as part of a novel viral mechanism of attacking a host. Accordingly, utilities of VGAM362 include diagnosis, prevention and treatment of viral infection by Vaccinia virus. Specific functions, and accordingly utilities, of VGAM362 correlate with, and may be deduced from, the identity of the host target genes which VGAM362 binds and inhibits, and the function of these host target genes, as elaborated hereinbelow.

[5033] Nucleotide sequences of the VGAM362 precursor RNA, herein designated VGAM PRECURSOR RNA, and of the diced VGAM362 RNA, herein designated VGAM RNA, and a schematic representation of the secondary folding of VGAM362 folded precursor RNA, herein designated VGAM FOLDED PRECURSOR RNA, of VGAM362 are further described hereinbelow with reference to Table 1.

[5034] Nucleotide sequences of host target binding sites, such as BINDING SITE-I, BINDING SITE-II and BINDING SITE-III of FIG. 1, found on, and schematic representation of the complementarity of each of these host target binding sites to VGAM362 RNA, herein designated VGAM RNA, are described hereinbelow with reference to Table 2.

[5035] FIG. 1 further provides a conceptual description of another novel bioinformatically detected viral gene of the present invention, referred to here as Viral Genomic Address Messenger 363 (VGAM363) viral gene, which modulates expression of respective host target genes thereof, the function and utility of which host target genes is known in the art.

[5036] VGAM363 is a novel bioinformatically detected regulatory, non protein coding, viral micro RNA (miRNA) gene. The method by which VGAM363 was detected is described hereinabove with reference to FIGS. 2-8.

[5037] VGAM363 gene, herein designated VGAM GENE, is a viral gene contained in the genome of Vaccinia virus. VGAM363 host target gene, herein designated VGAM HOST TARGET GENE, is a human gene contained in the human genome.

[5038] VGAM363 gene, herein designated VGAM GENE, encodes a VGAM363 precursor RNA, herein designated VGAM PRECURSOR RNA. Similar to other miRNA genes, and unlike most ordinary genes, VGAM363 precursor RNA, herein designated VGAM PRECURSOR RNA, does not encode a protein. A nucleotide sequence identical or highly similar to the nucleotide sequence of VGAM363 precursor RNA is designated SEQ ID:349, and is provided hereinbelow with reference to the sequence listing part. Nucleotide sequence SEQ ID:349 is located at position 185510 relative to the genome of Vaccinia virus.

[5039] VGAM363 precursor RNA, herein designated VGAM PRECURSOR RNA, folds onto itself, forming VGAM363 folded precursor RNA, herein designated VGAM FOLDED PRECURSOR RNA, which has a two-dimensional hairpin structure. As is well known in the art, this hairpin structure, is typical of RNA encoded by miRNA genes, and is due to the fact that the nucleotide sequence of the first half of the RNA encoded by a miRNA gene is an accurate or partial inversed-reversed sequence of the nucleotide sequence of the second half thereof.

[5040] An enzyme complex designated DICER COMPLEX, dices the VGAM363 folded precursor RNA, herein designated VGAM FOLDED PRECURSOR RNA, into VGAM363 RNA, herein designated VGAM RNA, a single stranded ˜22 nt long RNA segment. As is known in the art, dicing of a hairpin structured RNA precursor product into a short ˜22 nt RNA segment is catalyzed by an enzyme complex comprising an enzyme called Dicer together with other necessary proteins. A probable (over 87%) nucleotide sequence of VGAM363 RNA is designated SEQ ID:698, and is provided hereinbelow with reference to the sequence listing part.

[5041] VGAM363 host target gene, herein designated VGAM HOST TARGET GENE, encodes a corresponding messenger RNA, VGAM363 host target RNA, herein designated VGAM HOST TARGET RNA. VGAM363 host target RNA, herein designated VGAM HOST TARGET RNA, comprises three regions, as is typical of mRNA of a protein coding gene: a 5 untranslated region, a protein coding region and a 3 untranslated region, designated 5UTR, PROTEIN CODING and 3UTR respectively.

[5042] VGAM363 RNA, herein designated VGAM RNA, binds complementarily to one or more host target binding sites located in untranslated regions of VGAM363 host target RNA, herein designated VGAM HOST TARGET RNA. This complementary binding is due to the fact that the nucleotide sequence of VGAM363 RNA, herein designated VGAM RNA, is an accurate or a partial inversed-reversed sequence of the nucleotide sequence of each of the host target binding sites. As an illustration, FIG. 1 shows 3 such host target binding sites, designated BINDING SITE I, BINDING SITE II and BINDING SITE III respectively. It is appreciated that the number of host target binding sites shown in FIG. 1 is meant as an illustration only, and is not meant to be limiting VGAM363 RNA, herein designated VGAM RNA, may have a different number of host target binding sites in untranslated regions of a VGAM363 host target RNA, herein designated VGAM HOST TARGET RNA. It is further appreciated that while FIG. 1 depicts host target binding sites in the 3UTR region, this is meant as an example only these host target binding sites may be located in the 3UTR region, the 5UTR region, or in both 3UTR and 5UTR regions.

[5043] The complementary binding of VGAM363 RNA, herein designated VGAM RNA, to host target binding sites on VGAM363 host target RNA, herein designated VGAM HOST TARGET RNA, such as BINDING SITE I, BINDING SITE II and BINDING SITE III, inhibits translation of VGAM363 host target RNA, herein designated VGAM HOST TARGET RNA, into VGAM363 host target protein, herein designated VGAM HOST TARGET PROTEIN. VGAM host target protein is therefore outlined by a broken line.

[5044] It is appreciated that VGAM363 host target gene, herein designated VGAM HOST TARGET GENE, in fact represents a plurality of VGAM363 host target genes. The mRNA of each one of this plurality of VGAM363 host target genes comprises one or more host target binding sites, each having a nucleotide sequence which is at least partly complementary to VGAM363 RNA, herein designated VGAM RNA, and which when bound by VGAM363 RNA, herein designated VGAM RNA, causes inhibition of translation of respective one or more VGAM363 host target proteins.

[5045] It is further appreciated by one skilled in the art that the mode of translational inhibition illustrated by FIG. 1 with specific reference to translational inhibition exerted by VGAM363 gene, herein designated VGAM GENE, on one or more VGAM363 host target gene, herein designated VGAM HOST TARGET GENE, is in fact common to other known non-viral miRNA genes. As mentioned hereinabove with reference to the background section, although a specific complementary binding site has been demonstrated only for some of the known miRNA genes (primarily Lin-4 and Let-7), all other recently discovered miRNA genes are also believed by those skilled in the art to modulate expression of other genes by complementary binding, although specific complementary binding sites of these other miRNA genes have not yet been found (Ruvkun G., Perspective: Glimpses of a tiny RNA world, Science 294, 779 (2001)).

[5046] It is yet further appreciated that a function of VGAM363 is inhibition of expression of host target genes, as part of a novel viral mechanism of attacking a host. Accordingly, utilities of VGAM363 include diagnosis, prevention and treatment of viral infection by Vaccinia virus. Specific functions, and accordingly utilities, of VGAM363 correlate with, and may be deduced from, the identity of the host target genes which VGAM363 binds and inhibits, and the function of these host target genes, as elaborated hereinbelow.

[5047] Nucleotide sequences of the VGAM363 precursor RNA, herein designated VGAM PRECURSOR RNA, and of the diced VGAM363 RNA, herein designated VGAM RNA, and a schematic representation of the secondary folding of VGAM363 folded precursor RNA, herein designated VGAM FOLDED PRECURSOR RNA, of VGAM363 are further described hereinbelow with reference to Table 1.

[5048] Nucleotide sequences of host target binding sites, such as BINDING SITE-I, BINDING SITE-II and BINDING SITE-III of FIG. 1, found on, and schematic representation of the complementarity of each of these host target binding sites to VGAM363 RNA, herein designated VGAM RNA, are described hereinbelow with reference to Table 2.

[5049] FIG. 9 further provides a conceptual description of novel bioinformatically detected regulatory viral gene, referred to here as Viral Genomic Record 364(VGR364) viral gene, which encodes an operon-like cluster of novel viral micro RNA-like genes, each of which in turn modulates expression of at least one host target gene, the function and utility of which at least one host target gene is known in the art.

[5050] VGR364 gene, herein designated VGR GENE, is a novel bioinformatically detected regulatory, non protein coding, RNA viral gene. The method by which VGR364 gene was detected is described hereinabove with reference to FIGS. 6-15.

[5051] VGR364 gene encodes VGR364 precursor RNA, herein designated VGR PRECURSOR RNA, an RNA molecule, typically several hundred nucleotides long.

[5052] VGR364 precursor RNA folds spatially, forming VGR364 folded precursor RNA, herein designated VGR FOLDED PRECURSOR RNA. It is appreciated that VGR364 folded precursor RNA, herein designated VGR FOLDED PRECURSOR RNA, comprises a plurality of what is known in the art as hairpin structures. These hairpin structures are due to the fact that the nucleotide sequence of VGR364 precursor RNA comprises a plurality of segments, the first half of each such segment having a nucleotide sequence which is at least a partial inversed-reversed sequence of the second half thereof, as is well known in the art.

[5053] VGR364 folded precursor RNA, herein designated VGR FOLDED PRECURSOR RNA, is naturally processed by cellular enzymatic activity into at least 8 separate VGAM precursor RNAs, VGAM15 precursor RNA, VGAM16 precursor RNA, VGAM17 precursor RNA, VGAM18 precursor RNA, VGAM19 precursor RNA, VGAM20 precursor RNA, VGAM21 precursor RNA and VGAM22 precursor RNA, herein schematically represented by VGAM1 PRECURSOR, VGAM2 PRECURSOR, VGAM3 PRECURSOR, VGAM4 PRECURSOR, VGAM5 PRECURSOR, VGAM6 PRECURSOR, VGAM7 PRECURSOR and VGAM8 PRECURSOR respectively, each of which VGAM precursor RNAs being a hairpin shaped RNA segment, corresponding to VGAM PRECURSOR RNA of FIG. 8.

[5054] The above mentioned VGAM precursor RNAs are diced by DICER COMPLEX of FIG. 8, yielding respective short RNA segments of about 22 nucleotides in length, VGAM15 RNA, VGAM16 RNA, VGAM17 RNA, VGAM18 RNA, VGAM19 RNA, VGAM20 RNA, VGAM21 RNA and VGAM22 RNA respectively, herein schematically represented by VGAM1 RNA, VGAM2 RNA, VGAM3 RNA, VGAM4 RNA, VGAM5 RNA, VGAM6 RNA, VGAM7 RNA and VGAM8 RNA respectively, each of which VGAM RNAs corresponding to VGAM RNA of FIG. 8.

[5055] VGAM15 RNA, herein schematically represented by VGAM1 binds complimentarily to a host target binding site located in an untranslated region of VGAM15 host target RNA, herein schematically represented by VGAM1 HOST TARGET RNA, which host target binding site corresponds to a host target binding site such as BINDING SITE I, BINDING SITE II or BINDING SITE III of FIG. 1, thereby inhibiting translation of VGAM15 host target RNA, herein schematically represented by VGAM1 HOST TARGET RNA into VGAM15 host target protein, herein schematically represented by VGAM1 HOST TARGET PROTEIN, both of FIG. 1.

[5056] VGAM16 RNA, herein schematically represented by VGAM2 binds complimentarily to a host target binding site located in an untranslated region of VGAM16 host target RNA, herein schematically represented by VGAM2 HOST TARGET RNA, which host target binding site corresponds to a host target binding site such as BINDING SITE 1, BINDING SITE II or BINDING SITE III of FIG. 1, thereby inhibiting translation of VGAM16 host target RNA, herein schematically represented by VGAM2 HOST TARGET RNA into VGAM16 host target protein, herein schematically represented by VGAM2 HOST TARGET PROTEIN, both of FIG. 1.

[5057] VGAM17 RNA, herein schematically represented by VGAM3 binds complimentarily to a host target binding site located in an untranslated region of VGAM17 host target RNA, herein schematically represented by VGAM3 HOST TARGET RNA, which host target binding site corresponds to a host target binding site such as BINDING SITE 1, BINDING SITE II or BINDING SITE III of FIG. 1, thereby inhibiting translation of VGAM17 host target RNA, herein schematically represented by VGAM3 HOST TARGET RNA into VGAM17 host target protein, herein schematically represented by VGAM3 HOST TARGET PROTEIN, both of FIG. 1.

[5058] VGAM18 RNA, herein schematically represented by VGAM4 binds complimentarily to a host target binding site located in an untranslated region of VGAM18 host target RNA, herein schematically represented by VGAM4 HOST TARGET RNA, which host target binding site corresponds to a host target binding site such as BINDING SITE I, BINDING SITE II or BINDING SITE III of FIG. 1, thereby inhibiting translation of VGAM18 host target RNA, herein schematically represented by VGAM4 HOST TARGET RNA into VGAM18 host target protein, herein schematically represented by VGAM4 HOST TARGET PROTEIN, both of FIG. 1.

[5059] VGAM19 RNA, herein schematically represented by VGAM5 binds complimentarily to a host target binding site located in an untranslated region of VGAM19 host target RNA, herein schematically represented by VGAM5 HOST TARGET RNA, which host target binding site corresponds to a host target binding site such as BINDING SITE I, BINDING SITE II or BINDING SITE III of FIG. 1, thereby inhibiting translation of VGAM19 host target RNA, herein schematically represented by VGAM5 HOST TARGET RNA into VGAM19 host target protein, herein schematically represented by VGAM5 HOST TARGET PROTEIN, both of FIG. 1.

[5060] VGAM20 RNA, herein schematically represented by VGAM6 binds complimentarily to a host target binding site located in an untranslated region of VGAM20 host target RNA, herein schematically represented by VGAM6 HOST TARGET RNA, which host target binding site corresponds to a host target binding site such as BINDING SITE I, BINDING SITE II or BINDING SITE III of FIG. 1, thereby inhibiting translation of VGAM20 host target RNA, herein schematically represented by VGAM6 HOST TARGET RNA into VGAM20 host target protein, herein schematically represented by VGAM6 HOST TARGET PROTEIN, both of FIG. 1.

[5061] VGAM21 RNA, herein schematically represented by VGAM7 binds complimentarily to a host target binding site located in an untranslated region of VGAM21 host target RNA, herein schematically represented by VGAM7 HOST TARGET RNA, which host target binding site corresponds to a host target binding site such as BINDING SITE I, BINDING SITE II or BINDING SITE III of FIG. 1, thereby inhibiting translation of VGAM21 host target RNA, herein schematically represented by VGAM7 HOST TARGET RNA into VGAM21 host target protein, herein schematically represented by VGAM7 HOST TARGET PROTEIN, both of FIG. 1.

[5062] VGAM22 RNA, herein schematically represented by VGAM8 binds complimentarily to a host target binding site located in an untranslated region of VGAM22 host target RNA, herein schematically represented by VGAM8 HOST TARGET RNA, which host target binding site corresponds to a host target binding site such as BINDING SITE I, BINDING SITE II or BINDING SITE III of FIG. 1, thereby inhibiting translation of VGAM22 host target RNA, herein schematically represented by VGAM8 HOST TARGET RNA into VGAM22 host target protein, herein schematically represented by VGAM8 HOST TARGET PROTEIN, both of FIG. 1.

[5063] It is appreciated that a function of VGR364 gene, herein designated VGR GENE, is inhibition of expression of host target genes, as part of a novel viral mechanism of attacking a host. Accordingly, utilities of VGR364 gene include diagnosis, prevention and treatment of viral infection by. Specific functions, and accordingly utilities, of VGR364 gene, herein designated VGR GENE, correlate with, and may be deduced from, the identity of the host target genes, which are inhibited by VGAM RNAs comprised in the operon-like cluster of VGR364 gene: VGAM15 host target protein, VGAM16 host target protein, VGAM17 host target protein, VGAM18 host target protein, VGAM19 host target protein, VGAM20 host target protein, VGAM21 host target protein and VGAM22 host target protein, herein schematically represented by VGAM1 HOST TARGET PROTEIN through VGAM HOST TARGET PROTEIN respectively. The function of these host target genes is elaborated hereinabove with reference to VGAM15, VGAM16, VGAM17, VGAM18, VGAM19, VGAM20, VGAM21 and VGAM22

[5064] FIG. 9 further provides a conceptual description of novel bioinformatically detected regulatory viral gene, referred to here as Viral Genomic Record 365(VGR365) viral gene, which encodes an operon-like cluster of novel viral micro RNA-like genes, each of which in turn modulates expression of at least one host target gene, the function and utility of which at least one host target gene is known in the art.

[5065] VGR365 gene, herein designated VGR GENE, is a novel bioinformatically detected regulatory, non protein coding, RNA viral gene. The method by which VGR365 gene was detected is described hereinabove with reference to FIGS. 6-15.

[5066] VGR365 gene encodes VGR365 precursor RNA, herein designated VGR PRECURSOR RNA, an RNA molecule, typically several hundred nucleotides long.

[5067] VGR365 precursor RNA folds spatially, forming VGR365 folded precursor RNA, herein designated VGR FOLDED PRECURSOR RNA. It is appreciated that VGR365 folded precursor RNA, herein designated VGR FOLDED PRECURSOR RNA, comprises a plurality of what is known in the art as hairpin structures. These hairpin structures are due to the fact that the nucleotide sequence of VGR365 precursor RNA comprises a plurality of segments, the first half of each such segment having a nucleotide sequence which is at least a partial inversed-reversed sequence of the second half thereof, as is well known in the art.

[5068] VGR365 folded precursor RNA, herein designated VGR FOLDED PRECURSOR RNA, is naturally processed by cellular enzymatic activity into at least 8 separate VGAM precursor RNAs, VGAM23 precursor RNA, VGAM24 precursor RNA, VGAM25 precursor RNA, VGAM26 precursor RNA, VGAM27 precursor RNA, VGAM28 precursor RNA, VGAM29 precursor RNA and VGAM30 precursor RNA, herein schematically represented by VGAM1 PRECURSOR, VGAM2 PRECURSOR, VGAM3 PRECURSOR, VGAM4 PRECURSOR, VGAM5 PRECURSOR, VGAM6 PRECURSOR, VGAM7 PRECURSOR and VGAM8 PRECURSOR respectively, each of which VGAM precursor RNAs being a hairpin shaped RNA segment, corresponding to VGAM PRECURSOR RNA of FIG. 8.

[5069] The above mentioned VGAM precursor RNAs are diced by DICER COMPLEX of FIG. 8, yielding respective short RNA segments of about 22 nucleotides in length, VGAM23 RNA, VGAM24 RNA, VGAM25 RNA, VGAM26 RNA, VGAM27 RNA, VGAM28 RNA, VGAM29 RNA and VGAM30 RNA respectively, herein schematically represented by VGAM1 RNA, VGAM2 RNA, VGAM3 RNA, VGAM4 RNA, VGAM5 RNA, VGAM6 RNA, VGAM7 RNA and VGAM8 RNA respectively, each of which VGAM RNAs corresponding to VGAM RNA of FIG. 8.

[5070] VGAM23 RNA, herein schematically represented by VGAM1 binds complimentarily to a host target binding site located in an untranslated region of VGAM23 host target RNA, herein schematically represented by VGAM1 HOST TARGET RNA, which host target binding site corresponds to a host target binding site such as BINDING SITE I, BINDING SITE II or BINDING SITE III of FIG. 1, thereby inhibiting translation of VGAM23 host target RNA, herein schematically represented by VGAM1 HOST TARGET RNA into VGAM23 host target protein, herein schematically represented by VGAM1 HOST TARGET PROTEIN, both of FIG. 1.

[5071] VGAM24 RNA, herein schematically represented by VGAM2 binds complimentarily to a host target binding site located in an untranslated region of VGAM24 host target RNA, herein schematically represented by VGAM2 HOST TARGET RNA, which host target binding site corresponds to a host target binding site such as BINDING SITE I, BINDING SITE II or BINDING SITE III of FIG. 1, thereby inhibiting translation of VGAM24 host target RNA, herein schematically represented by VGAM2 HOST TARGET RNA into VGAM24 host target protein, herein schematically represented by VGAM2 HOST TARGET PROTEIN, both of FIG. 1.

[5072] VGAM25 RNA, herein schematically represented by VGAM3 binds complimentarily to a host target binding site located in an untranslated region of VGAM25 host target RNA, herein schematically represented by VGAM3 HOST TARGET RNA, which host target binding site corresponds to a host target binding site such as BINDING SITE 1, BINDING SITE II or BINDING SITE III of FIG. 1, thereby inhibiting translation of VGAM25 host target RNA, herein schematically represented by VGAM3 HOST TARGET RNA into VGAM25 host target protein, herein schematically represented by VGAM3 HOST TARGET PROTEIN, both of FIG. 1.

[5073] VGAM26 RNA, herein schematically represented by VGAM4 binds complimentarily to a host target binding site located in an untranslated region of VGAM26 host target RNA, herein schematically represented by VGAM4 HOST TARGET RNA, which host target binding site corresponds to a host target binding site such as BINDING SITE 1, BINDING SITE II or BINDING SITE III of FIG. 1, thereby inhibiting translation of VGAM26 host target RNA, herein schematically represented by VGAM4 HOST TARGET RNA into VGAM26 host target protein, herein schematically represented by VGAM4 HOST TARGET PROTEIN, both of FIG. 1.

[5074] VGAM27 RNA, herein schematically represented by VGAM5 binds complimentarily to a host target binding site located in an untranslated region of VGAM27 host target RNA, herein schematically represented by VGAM5 HOST TARGET RNA, which host target binding site corresponds to a host target binding site such as BINDING SITE 1, BINDING SITE II or BINDING SITE III of FIG. 1, thereby inhibiting translation of VGAM27 host target RNA, herein schematically represented by VGAM5 HOST TARGET RNA into VGAM27 host target protein, herein schematically represented by VGAM5 HOST TARGET PROTEIN, both of FIG. 1.

[5075] VGAM28 RNA, herein schematically represented by VGAM6 binds complimentarily to a host target binding site located in an untranslated region of VGAM28 host target RNA, herein schematically represented by VGAM6 HOST TARGET RNA, which host target binding site corresponds to a host target binding site such as BINDING SITE 1, BINDING SITE II or BINDING SITE III of FIG. 1, thereby inhibiting translation of VGAM28 host target RNA, herein schematically represented by VGAM6 HOST TARGET RNA into VGAM28 host target protein, herein schematically represented by VGAM6 HOST TARGET PROTEIN, both of FIG. 1.

[5076] VGAM29 RNA, herein schematically represented by VGAM7 binds complimentarily to a host target binding site located in an untranslated region of VGAM29 host target RNA, herein schematically represented by VGAM7 HOST TARGET RNA, which host target binding site corresponds to a host target binding site such as BINDING SITE 1, BINDING SITE II or BINDING SITE III of FIG. 1, thereby inhibiting translation of VGAM29 host target RNA, herein schematically represented by VGAM7 HOST TARGET RNA into VGAM29 host target protein, herein schematically represented by VGAM7 HOST TARGET PROTEIN, both of FIG. 1.

[5077] VGAM30 RNA, herein schematically represented by VGAM8 binds complimentarily to a host target binding site located in an untranslated region of VGAM30 host target RNA, herein schematically represented by VGAM8 HOST TARGET RNA, which host target binding site corresponds to a host target binding site such as BINDING SITE 1, BINDING SITE II or BINDING SITE III of FIG. 1, thereby inhibiting translation of VGAM30 host target RNA, herein schematically represented by VGAM8 HOST TARGET RNA into VGAM30 host target protein, herein schematically represented by VGAM8 HOST TARGET PROTEIN, both of FIG. 1.

[5078] It is appreciated that a function of VGR365 gene, herein designated VGR GENE, is inhibition of expression of host target genes, as part of a novel viral mechanism of attacking a host. Accordingly, utilities of VGR365 gene include diagnosis, prevention and treatment of viral infection by. Specific functions, and accordingly utilities, of VGR365 gene, herein designated VGR GENE, correlate with, and may be deduced from, the identity of the host target genes, which are inhibited by VGAM RNAs comprised in the operon-like cluster of VGR365 gene: VGAM23 host target protein, VGAM24 host target protein, VGAM25 host target protein, VGAM26 host target protein, VGAM27 host target protein, VGAM28 host target protein, VGAM29 host target protein and VGAM30 host target protein, herein schematically represented by VGAM1 HOST TARGET PROTEIN through VGAM HOST TARGET PROTEIN respectively. The function of these host target genes is elaborated hereinabove with reference to VGAM23, VGAM24, VGAM25, VGAM26, VGAM27, VGAM28, VGAM29 and VGAM30

[5079] FIG. 9 further provides a conceptual description of novel bioinformatically detected regulatory viral gene, referred to here as Viral Genomic Record 366(VGR366) viral gene, which encodes an operon-like cluster of novel viral micro RNA-like genes, each of which in turn modulates expression of at least one host target gene, the function and utility of which at least one host target gene is known in the art.

[5080] VGR366 gene, herein designated VGR GENE, is a novel bioinformatically detected regulatory, non protein coding, RNA viral gene. The method by which VGR366 gene was detected is described hereinabove with reference to FIGS. 6-15.

[5081] VGR366 gene encodes VGR366 precursor RNA, herein designated VGR PRECURSOR RNA, an RNA molecule, typically several hundred nucleotides long.

[5082] VGR366 precursor RNA folds spatially, forming VGR366 folded precursor RNA, herein designated VGR FOLDED PRECURSOR RNA. It is appreciated that VGR366 folded precursor RNA, herein designated VGR FOLDED PRECURSOR RNA, comprises a plurality of what is known in the art as hairpin structures. These hairpin structures are due to the fact that the nucleotide sequence of VGR366 precursor RNA comprises a plurality of segments, the first half of each such segment having a nucleotide sequence which is at least a partial inversed-reversed sequence of the second half thereof, as is well known in the art.

[5083] VGR366 folded precursor RNA, herein designated VGR FOLDED PRECURSOR RNA, is naturally processed by cellular enzymatic activity into at least 4 separate VGAM precursor RNAs, VGAM31 precursor RNA, VGAM32 precursor RNA, VGAM33 precursor RNA and VGAM34 precursor RNA, herein schematically represented by VGAM1 PRECURSOR, VGAM2 PRECURSOR, VGAM3 PRECURSOR and VGAM4 PRECURSOR respectively, each of which VGAM precursor RNAs being a hairpin shaped RNA segment, corresponding to VGAM PRECURSOR RNA of FIG. 8.

[5084] The above mentioned VGAM precursor RNAs are diced by DICER COMPLEX of FIG. 8, yielding respective short RNA segments of about 22 nucleotides in length, VGAM31 RNA, VGAM32 RNA, VGAM33 RNA and VGAM34 RNA respectively, herein schematically represented by VGAM1 RNA, VGAM2 RNA, VGAM3 RNA and VGAM4 RNA respectively, each of which VGAM RNAs corresponding to VGAM RNA of FIG. 8.

[5085] VGAM31 RNA, herein schematically represented by VGAM1 binds complimentarily to a host target binding site located in an untranslated region of VGAM31 host target RNA, herein schematically represented by VGAM1 HOST TARGET RNA, which host target binding site corresponds to a host target binding site such as BINDING SITE I, BINDING SITE II or BINDING SITE III of FIG. 1, thereby inhibiting translation of VGAM31 host target RNA, herein schematically represented by VGAM1 HOST TARGET RNA into VGAM31 host target protein, herein schematically represented by VGAM1 HOST TARGET PROTEIN, both of FIG. 1.

[5086] VGAM32 RNA, herein schematically represented by VGAM2 binds complimentarily to a host target binding site located in an untranslated region of VGAM32 host target RNA, herein schematically represented by VGAM2 HOST TARGET RNA, which host target binding site corresponds to a host target binding site such as BINDING SITE I, BINDING SITE II or BINDING SITE III of FIG. 1, thereby inhibiting translation of VGAM32 host target RNA, herein schematically represented by VGAM2 HOST TARGET RNA into VGAM32 host target protein, herein schematically represented by VGAM2 HOST TARGET PROTEIN, both of FIG. 1.

[5087] VGAM33 RNA, herein schematically represented by VGAM3 binds complimentarily to a host target binding site located in an untranslated region of VGAM33 host target RNA, herein schematically represented by VGAM3 HOST TARGET RNA, which host target binding site corresponds to a host target binding site such as BINDING SITE 1, BINDING SITE II or BINDING SITE III of FIG. 1, thereby inhibiting translation of VGAM33 host target RNA, herein schematically represented by VGAM3 HOST TARGET RNA into VGAM33 host target protein, herein schematically represented by VGAM3 HOST TARGET PROTEIN, both of FIG. 1.

[5088] VGAM34 RNA, herein schematically represented by VGAM4 binds complimentarily to a host target binding site located in an untranslated region of VGAM34 host target RNA, herein schematically represented by VGAM4 HOST TARGET RNA, which host target binding site corresponds to a host target binding site such as BINDING SITE 1, BINDING SITE II or BINDING SITE III of FIG. 1, thereby inhibiting translation of VGAM34 host target RNA, herein schematically represented by VGAM4 HOST TARGET RNA into VGAM34 host target protein, herein schematically represented by VGAM4 HOST TARGET PROTEIN, both of FIG. 1.

[5089] It is appreciated that a function of VGR366 gene, herein designated VGR GENE, is inhibition of expression of host target genes, as part of a novel viral mechanism of attacking a host. Accordingly, utilities of VGR366 gene include diagnosis, prevention and treatment of viral infection by. Specific functions, and accordingly utilities, of VGR366 gene, herein designated VGR GENE, correlate with, and may be deduced from, the identity of the host target genes, which are inhibited by VGAM RNAs comprised in the operon-like cluster of VGR366 gene: VGAM31 host target protein, VGAM32 host target protein, VGAM33 host target protein and VGAM34 host target protein, herein schematically represented by VGAM1 HOST TARGET PROTEIN through VGAM HOST TARGET PROTEIN respectively. The function of these host target genes is elaborated hereinabove with reference to VGAM31, VGAM32, VGAM33 and VGAM34

[5090] FIG. 9 further provides a conceptual description of novel bioinformatically detected regulatory viral gene, referred to here as Viral Genomic Record 367(VGR367) viral gene, which encodes an operon-like cluster of novel viral micro RNA-like genes, each of which in turn modulates expression of at least one host target gene, the function and utility of which at least one host target gene is known in the art.

[5091] VGR367 gene, herein designated VGR GENE, is a novel bioinformatically detected regulatory, non protein coding, RNA viral gene. The method by which VGR367 gene was detected is described hereinabove with reference to FIGS. 6-15.

[5092] VGR367 gene encodes VGR367 precursor RNA, herein designated VGR PRECURSOR RNA, an RNA molecule, typically several hundred nucleotides long.

[5093] VGR367 precursor RNA folds spatially, forming VGR367 folded precursor RNA, herein designated VGR FOLDED PRECURSOR RNA. It is appreciated that VGR367 folded precursor RNA, herein designated VGR FOLDED PRECURSOR RNA, comprises a plurality of what is known in the art as hairpin structures. These hairpin structures are due to the fact that the nucleotide sequence of VGR367 precursor RNA comprises a plurality of segments, the first half of each such segment having a nucleotide sequence which is at least a partial inversed-reversed sequence of the second half thereof, as is well known in the art.

[5094] VGR367 folded precursor RNA, herein designated VGR FOLDED PRECURSOR RNA, is naturally processed by cellular enzymatic activity into at least 8 separate VGAM precursor RNAs, VGAM35 precursor RNA, VGAM36 precursor RNA, VGAM37 precursor RNA, VGAM38 precursor RNA, VGAM39 precursor RNA, VGAM40 precursor RNA, VGAM41 precursor RNA and VGAM42 precursor RNA, herein schematically represented by VGAM1 PRECURSOR, VGAM2 PRECURSOR, VGAM3 PRECURSOR, VGAM4 PRECURSOR, VGAM5 PRECURSOR, VGAM6 PRECURSOR, VGAM7 PRECURSOR and VGAM8 PRECURSOR respectively, each of which VGAM precursor RNAs being a hairpin shaped RNA segment, corresponding to VGAM PRECURSOR RNA of FIG. 8.

[5095] The above mentioned VGAM precursor RNAs are diced by DICER COMPLEX of FIG. 8, yielding respective short RNA segments of about 22 nucleotides in length, VGAM35 RNA, VGAM36 RNA, VGAM37 RNA, VGAM38 RNA, VGAM39 RNA, VGAM40 RNA, VGAM41 RNA and VGAM42 RNA respectively, herein schematically represented by VGAM1 RNA, VGAM2 RNA, VGAM3 RNA, VGAM4 RNA, VGAM5 RNA, VGAM6 RNA, VGAM7 RNA and VGAM8 RNA respectively, each of which VGAM RNAs corresponding to VGAM RNA of FIG. 8.

[5096] VGAM35 RNA, herein schematically represented by VGAM1 binds complimentarily to a host target binding site located in an untranslated region of VGAM35 host target RNA, herein schematically represented by VGAM1 HOST TARGET RNA, which host target binding site corresponds to a host target binding site such as BINDING SITE 1, BINDING SITE II or BINDING SITE III of FIG. 1, thereby inhibiting translation of VGAM35 host target RNA, herein schematically represented by VGAM1 HOST TARGET RNA into VGAM35 host target protein, herein schematically represented by VGAM1 HOST TARGET PROTEIN, both of FIG. 1.

[5097] VGAM36 RNA, herein schematically represented by VGAM2 binds complimentarily to a host target binding site located in an untranslated region of VGAM36 host target RNA, herein schematically represented by VGAM2 HOST TARGET RNA, which host target binding site corresponds to a host target binding site such as BINDING SITE 1, BINDING SITE II or BINDING SITE III of FIG. 1, thereby inhibiting translation of VGAM36 host target RNA, herein schematically represented by VGAM2 HOST TARGET RNA into VGAM36 host target protein, herein schematically represented by VGAM2 HOST TARGET PROTEIN, both of FIG. 1.

[5098] VGAM37 RNA, herein schematically represented by VGAM3 binds complimentarily to a host target binding site located in an untranslated region of VGAM37 host target RNA, herein schematically represented by VGAM3 HOST TARGET RNA, which host target binding site corresponds to a host target binding site such as BINDING SITE 1, BINDING SITE II or BINDING SITE III of FIG. 1, thereby inhibiting translation of VGAM37 host target RNA, herein schematically represented by VGAM3 HOST TARGET RNA into VGAM37 host target protein, herein schematically represented by VGAM3 HOST TARGET PROTEIN, both of FIG. 1.

[5099] VGAM38 RNA, herein schematically represented by VGAM4 binds complimentarily to a host target binding site located in an untranslated region of VGAM38 host target RNA, herein schematically represented by VGAM4 HOST TARGET RNA, which host target binding site corresponds to a host target binding site such as BINDING SITE 1, BINDING SITE II or BINDING SITE III of FIG. 1, thereby inhibiting translation of VGAM38 host target RNA, herein schematically represented by VGAM4 HOST TARGET RNA into VGAM38 host target protein, herein schematically represented by VGAM4 HOST TARGET PROTEIN, both of FIG. 1.

[5100] VGAM39 RNA, herein schematically represented by VGAM5 binds complimentarily to a host target binding site located in an untranslated region of VGAM39 host target RNA, herein schematically represented by VGAM5 HOST TARGET RNA, which host target binding site corresponds to a host target binding site such as BINDING SITE I, BINDING SITE II or BINDING SITE III of FIG. 1, thereby inhibiting translation of VGAM39 host target RNA, herein schematically represented by VGAM5 HOST TARGET RNA into VGAM39 host target protein, herein schematically represented by VGAM5 HOST TARGET PROTEIN, both of FIG. 1.

[5101] VGAM40 RNA, herein schematically represented by VGAM6 binds complimentarily to a host target binding site located in an untranslated region of VGAM40 host target RNA, herein schematically represented by VGAM6 HOST TARGET RNA, which host target binding site corresponds to a host target binding site such as BINDING SITE I, BINDING SITE II or BINDING SITE III of FIG. 1, thereby inhibiting translation of VGAM40 host target RNA, herein schematically represented by VGAM6 HOST TARGET RNA into VGAM40 host target protein, herein schematically represented by VGAM6 HOST TARGET PROTEIN, both of FIG. 1.

[5102] VGAM41 RNA, herein schematically represented by VGAM7 binds complimentarily to a host target binding site located in an untranslated region of VGAM41 host target RNA, herein schematically represented by VGAM7 HOST TARGET RNA, which host target binding site corresponds to a host target binding site such as BINDING SITE I, BINDING SITE II or BINDING SITE III of FIG. 1, thereby inhibiting translation of VGAM41 host target RNA, herein schematically represented by VGAM7 HOST TARGET RNA into VGAM41 host target protein, herein schematically represented by VGAM7 HOST TARGET PROTEIN, both of FIG. 1.

[5103] VGAM42 RNA, herein schematically represented by VGAM8 binds complimentarily to a host target binding site located in an untranslated region of VGAM42 host target RNA, herein schematically represented by VGAM8 HOST TARGET RNA, which host target binding site corresponds to a host target binding site such as BINDING SITE I, BINDING SITE II or BINDING SITE III of FIG. 1, thereby inhibiting translation of VGAM42 host target RNA, herein schematically represented by VGAM8 HOST TARGET RNA into VGAM42 host target protein, herein schematically represented by VGAM8 HOST TARGET PROTEIN, both of FIG. 1.

[5104] It is appreciated that a function of VGR367 gene, herein designated VGR GENE, is inhibition of expression of host target genes, as part of a novel viral mechanism of attacking a host. Accordingly, utilities of VGR367 gene include diagnosis, prevention and treatment of viral infection by. Specific functions, and accordingly utilities, of VGR367 gene, herein designated VGR GENE, correlate with, and may be deduced from, the identity of the host target genes, which are inhibited by VGAM RNAs comprised in the operon-like cluster of VGR367 gene: VGAM35 host target protein, VGAM36 host target protein, VGAM37 host target protein, VGAM38 host target protein, VGAM39 host target protein, VGAM40 host target protein, VGAM41 host target protein and VGAM42 host target protein, herein schematically represented by VGAM1 HOST TARGET PROTEIN through VGAM HOST TARGET PROTEIN respectively. The function of these host target genes is elaborated hereinabove with reference to VGAM35, VGAM36, VGAM37, VGAM38, VGAM39, VGAM40, VGAM41 and VGAM42

[5105] FIG. 9 further provides a conceptual description of novel bioinformatically detected regulatory viral gene, referred to here as Viral Genomic Record 368(VGR368) viral gene, which encodes an operon-like cluster of novel viral micro RNA-like genes, each of which in turn modulates expression of at least one host target gene, the function and utility of which at least one host target gene is known in the art.

[5106] VGR368 gene, herein designated VGR GENE, is a novel bioinformatically detected regulatory, non protein coding, RNA viral gene. The method by which VGR368 gene was detected is described hereinabove with reference to FIGS. 6-15.

[5107] VGR368 gene encodes VGR368 precursor RNA, herein designated VGR PRECURSOR RNA, an RNA molecule, typically several hundred nucleotides long.

[5108] VGR368 precursor RNA folds spatially, forming VGR368 folded precursor RNA, herein designated VGR FOLDED PRECURSOR RNA. It is appreciated that VGR368 folded precursor RNA, herein designated VGR FOLDED PRECURSOR RNA, comprises a plurality of what is known in the art as hairpin structures. These hairpin structures are due to the fact that the nucleotide sequence of VGR368 precursor RNA comprises a plurality of segments, the first half of each such segment having a nucleotide sequence which is at least a partial inversed-reversed sequence of the second half thereof, as is well known in the art.

[5109] VGR368 folded precursor RNA, herein designated VGR FOLDED PRECURSOR RNA, is naturally processed by cellular enzymatic activity into at least 8 separate VGAM precursor RNAs, VGAM43 precursor RNA, VGAM44 precursor RNA, VGAM45 precursor RNA, VGAM46 precursor RNA, VGAM47 precursor RNA, VGAM48 precursor RNA, VGAM49 precursor RNA and VGAM50 precursor RNA, herein schematically represented by VGAM1 PRECURSOR, VGAM2 PRECURSOR, VGAM3 PRECURSOR, VGAM4 PRECURSOR, VGAM5 PRECURSOR, VGAM6 PRECURSOR, VGAM7 PRECURSOR and VGAM8 PRECURSOR respectively, each of which VGAM precursor RNAs being a hairpin shaped RNA segment, corresponding to VGAM PRECURSOR RNA of FIG. 8.

[5110] The above mentioned VGAM precursor RNAs are diced by DICER COMPLEX of FIG. 8, yielding respective short RNA segments of about 22 nucleotides in length, VGAM43 RNA, VGAM44 RNA, VGAM45 RNA, VGAM46 RNA, VGAM47 RNA, VGAM48 RNA, VGAM49 RNA and VGAM50 RNA respectively, herein schematically represented by VGAM1 RNA, VGAM2 RNA, VGAM3 RNA, VGAM4 RNA, VGAM5 RNA, VGAM6 RNA, VGAM7 RNA and VGAM8 RNA respectively, each of which VGAM RNAs corresponding to VGAM RNA of FIG. 8.

[5111] VGAM43 RNA, herein schematically represented by VGAM1 binds complimentarily to a host target binding site located in an untranslated region of VGAM43 host target RNA, herein schematically represented by VGAM1 HOST TARGET RNA, which host target binding site corresponds to a host target binding site such as BINDING SITE I, BINDING SITE II or BINDING SITE III of FIG. 1, thereby inhibiting translation of VGAM43 host target RNA, herein schematically represented by VGAM1 HOST TARGET RNA into VGAM43 host target protein, herein schematically represented by VGAM1 HOST TARGET PROTEIN, both of FIG. 1.

[5112] VGAM44 RNA, herein schematically represented by VGAM2 binds complimentarily to a host target binding site located in an untranslated region of VGAM44 host target RNA, herein schematically represented by VGAM2 HOST TARGET RNA, which host target binding site corresponds to a host target binding site such as BINDING SITE I, BINDING SITE II or BINDING SITE III of FIG. 1, thereby inhibiting translation of VGAM44 host target RNA, herein schematically represented by VGAM2 HOST TARGET RNA into VGAM44 host target protein, herein schematically represented by VGAM2 HOST TARGET PROTEIN, both of FIG. 1.

[5113] VGAM45 RNA, herein schematically represented by VGAM3 binds complimentarily to a host target binding site located in an untranslated region of VGAM45 host target RNA, herein schematically represented by VGAM3 HOST TARGET RNA, which host target binding site corresponds to a host target binding site such as BINDING SITE I, BINDING SITE II or BINDING SITE III of FIG. 1, thereby inhibiting translation of VGAM45 host target RNA, herein schematically represented by VGAM3 HOST TARGET RNA into VGAM45 host target protein, herein schematically represented by VGAM3 HOST TARGET PROTEIN, both of FIG. 1.

[5114] VGAM46 RNA, herein schematically represented by VGAM4 binds complimentarily to a host target binding site located in an untranslated region of VGAM46 host target RNA, herein schematically represented by VGAM4 HOST TARGET RNA, which host target binding site corresponds to a host target binding site such as BINDING SITE I, BINDING SITE II or BINDING SITE III of FIG. 1, thereby inhibiting translation of VGAM46 host target RNA, herein schematically represented by VGAM4 HOST TARGET RNA into VGAM46 host target protein, herein schematically represented by VGAM4 HOST TARGET PROTEIN, both of FIG. 1.

[5115] VGAM47 RNA, herein schematically represented by VGAM5 binds complimentarily to a host target binding site located in an untranslated region of VGAM47 host target RNA, herein schematically represented by VGAM5 HOST TARGET RNA, which host target binding site corresponds to a host target binding site such as BINDING SITE I, BINDING SITE II or BINDING SITE III of FIG. 1, thereby inhibiting translation of VGAM47 host target RNA, herein schematically represented by VGAM5 HOST TARGET RNA into VGAM47 host target protein, herein schematically represented by VGAM5 HOST TARGET PROTEIN, both of FIG. 1.

[5116] VGAM48 RNA, herein schematically represented by VGAM6 binds complimentarily to a host target binding site located in an untranslated region of VGAM48 host target RNA, herein schematically represented by VGAM6 HOST TARGET RNA, which host target binding site corresponds to a host target binding site such as BINDING SITE I, BINDING SITE II or BINDING SITE III of FIG. 1, thereby inhibiting translation of VGAM48 host target RNA, herein schematically represented by VGAM6 HOST TARGET RNA into VGAM48 host target protein, herein schematically represented by VGAM6 HOST TARGET PROTEIN, both of FIG. 1.

[5117] VGAM49 RNA, herein schematically represented by VGAM7 binds complimentarily to a host target binding site located in an untranslated region of VGAM49 host target RNA, herein schematically represented by VGAM7 HOST TARGET RNA, which host target binding site corresponds to a host target binding site such as BINDING SITE I, BINDING SITE II or BINDING SITE III of FIG. 1, thereby inhibiting translation of VGAM49 host target RNA, herein schematically represented by VGAM7 HOST TARGET RNA into VGAM49 host target protein, herein schematically represented by VGAM7 HOST TARGET PROTEIN, both of FIG. 1.

[5118] VGAM50 RNA, herein schematically represented by VGAM8 binds complimentarily to a host target binding site located in an untranslated region of VGAM50 host target RNA, herein schematically represented by VGAM8 HOST TARGET RNA, which host target binding site corresponds to a host target binding site such as BINDING SITE I, BINDING SITE II or BINDING SITE III of FIG. 1, thereby inhibiting translation of VGAM50 host target RNA, herein schematically represented by VGAM8 HOST TARGET RNA into VGAM50 host target protein, herein schematically represented by VGAM8 HOST TARGET PROTEIN, both of FIG. 1.

[5119] It is appreciated that a function of VGR368 gene, herein designated VGR GENE, is inhibition of expression of host target genes, as part of a novel viral mechanism of attacking a host. Accordingly, utilities of VGR368 gene include diagnosis, prevention and treatment of viral infection by. Specific functions, and accordingly utilities, of VGR368 gene, herein designated VGR GENE, correlate with, and may be deduced from, the identity of the host target genes, which are inhibited by VGAM RNAs comprised in the operon-like cluster of VGR368 gene: VGAM43 host target protein, VGAM44 host target protein, VGAM45 host target protein, VGAM46 host target protein, VGAM47 host target protein, VGAM48 host target protein, VGAM49 host target protein and VGAM50 host target protein, herein schematically represented by VGAM1 HOST TARGET PROTEIN through VGAM HOST TARGET PROTEIN respectively. The function of these host target genes is elaborated hereinabove with reference to VGAM43, VGAM44, VGAM45, VGAM46, VGAM47, VGAM48, VGAM49 and VGAM50

[5120] FIG. 9 further provides a conceptual description of novel bioinformatically detected regulatory viral gene, referred to here as Viral Genomic Record 369(VGR369) viral gene, which encodes an operon-like cluster of novel viral micro RNA-like genes, each of which in turn modulates expression of at least one host target gene, the function and utility of which at least one host target gene is known in the art.

[5121] VGR369 gene, herein designated VGR GENE, is a novel bioinformatically detected regulatory, non protein coding, RNA viral gene. The method by which VGR369 gene was detected is described hereinabove with reference to FIGS. 6-15.

[5122] VGR369 gene encodes VGR369 precursor RNA, herein designated VGR PRECURSOR RNA, an RNA molecule, typically several hundred nucleotides long.

[5123] VGR369 precursor RNA folds spatially, forming VGR369 folded precursor RNA, herein designated VGR FOLDED PRECURSOR RNA. It is appreciated that VGR369 folded precursor RNA, herein designated VGR FOLDED PRECURSOR RNA, comprises a plurality of what is known in the art as hairpin structures. These hairpin structures are due to the fact that the nucleotide sequence of VGR369 precursor RNA comprises a plurality of segments, the first half of each such segment having a nucleotide sequence which is at least a partial inversed-reversed sequence of the second half thereof, as is well known in the art.

[5124] VGR369 folded precursor RNA, herein designated VGR FOLDED PRECURSOR RNA, is naturally processed by cellular enzymatic activity into at least 4 separate VGAM precursor RNAs, VGAM51 precursor RNA, VGAM52 precursor RNA, VGAM53 precursor RNA and VGAM54 precursor RNA, herein schematically represented by VGAM1 PRECURSOR, VGAM2 PRECURSOR, VGAM3 PRECURSOR and VGAM4 PRECURSOR respectively, each of which VGAM precursor RNAs being a hairpin shaped RNA segment, corresponding to VGAM PRECURSOR RNA of FIG. 8.

[5125] The above mentioned VGAM precursor RNAs are diced by DICER COMPLEX of FIG. 8, yielding respective short RNA segments of about 22 nucleotides in length, VGAM51 RNA, VGAM52 RNA, VGAM53 RNA and VGAM54 RNA respectively, herein schematically represented by VGAM1 RNA, VGAM2 RNA, VGAM3 RNA and VGAM4 RNA respectively, each of which VGAM RNAs corresponding to VGAM RNA of FIG. 8.

[5126] VGAM51 RNA, herein schematically represented by VGAM1 binds complimentarily to a host target binding site located in an untranslated region of VGAM51 host target RNA, herein schematically represented by VGAM1 HOST TARGET RNA, which host target binding site corresponds to a host target binding site such as BINDING SITE I, BINDING SITE II or BINDING SITE III of FIG. 1, thereby inhibiting translation of VGAM51 host target RNA, herein schematically represented by VGAM1 HOST TARGET RNA into VGAM51 host target protein, herein schematically represented by VGAM1 HOST TARGET PROTEIN, both of FIG. 1.

[5127] VGAM52 RNA, herein schematically represented by VGAM2 binds complimentarily to a host target binding site located in an untranslated region of VGAM52 host target RNA, herein schematically represented by VGAM2 HOST TARGET RNA, which host target binding site corresponds to a host target binding site such as BINDING SITE I, BINDING SITE II or BINDING SITE III of FIG. 1, thereby inhibiting translation of VGAM52 host target RNA, herein schematically represented by VGAM2 HOST TARGET RNA into VGAM52 host target protein, herein schematically represented by VGAM2 HOST TARGET PROTEIN, both of FIG. 1.

[5128] VGAM53 RNA, herein schematically represented by VGAM3 binds complimentarily to a host target binding site located in an untranslated region of VGAM53 host target RNA, herein schematically represented by VGAM3 HOST TARGET RNA, which host target binding site corresponds to a host target binding site such as BINDING SITE I, BINDING SITE II or BINDING SITE III of FIG. 1, thereby inhibiting translation of VGAM53 host target RNA, herein schematically represented by VGAM3 HOST TARGET RNA into VGAM53 host target protein, herein schematically represented by VGAM3 HOST TARGET PROTEIN, both of FIG. 1.

[5129] VGAM54 RNA, herein schematically represented by VGAM4 binds complimentarily to a host target binding site located in an untranslated region of VGAM54 host target RNA, herein schematically represented by VGAM4 HOST TARGET RNA, which host target binding site corresponds to a host target binding site such as BINDING SITE I, BINDING SITE II or BINDING SITE III of FIG. 1, thereby inhibiting translation of VGAM54 host target RNA, herein schematically represented by VGAM4 HOST TARGET RNA into VGAM54 host target protein, herein schematically represented by VGAM4 HOST TARGET PROTEIN, both of FIG. 1.

[5130] It is appreciated that a function of VGR369 gene, herein designated VGR GENE, is inhibition of expression of host target genes, as part of a novel viral mechanism of attacking a host. Accordingly, utilities of VGR369 gene include diagnosis, prevention and treatment of viral infection by. Specific functions, and accordingly utilities, of VGR369 gene, herein designated VGR GENE, correlate with, and may be deduced from, the identity of the host target genes, which are inhibited by VGAM RNAs comprised in the operon-like cluster of VGR369 gene: VGAM51 host target protein, VGAM52 host target protein, VGAM53 host target protein and VGAM54 host target protein, herein schematically represented by VGAM1 HOST TARGET PROTEIN through VGAM HOST TARGET PROTEIN respectively. The function of these host target genes is elaborated hereinabove with reference to VGAM51, VGAM52, VGAM53 and VGAM54

[5131] FIG. 9 further provides a conceptual description of novel bioinformatically detected regulatory viral gene, referred to here as Viral Genomic Record 370(VGR370) viral gene, which encodes an operon-like cluster of novel viral micro RNA-like genes, each of which in turn modulates expression of at least one host target gene, the function and utility of which at least one host target gene is known in the art.

[5132] VGR370 gene, herein designated VGR GENE, is a novel bioinformatically detected regulatory, non protein coding, RNA viral gene. The method by which VGR370 gene was detected is described hereinabove with reference to FIGS. 6-15.

[5133] VGR370 gene encodes VGR370 precursor RNA, herein designated VGR PRECURSOR RNA, an RNA molecule, typically several hundred nucleotides long.

[5134] VGR370 precursor RNA folds spatially, forming VGR370 folded precursor RNA, herein designated VGR FOLDED PRECURSOR RNA. It is appreciated that VGR370 folded precursor RNA, herein designated VGR FOLDED PRECURSOR RNA, comprises a plurality of what is known in the art as hairpin structures. These hairpin structures are due to the fact that the nucleotide sequence of VGR370 precursor RNA comprises a plurality of segments, the first half of each such segment having a nucleotide sequence which is at least a partial inversed-reversed sequence of the second half thereof, as is well known in the art.

[5135] VGR370 folded precursor RNA, herein designated VGR FOLDED PRECURSOR RNA, is naturally processed by cellular enzymatic activity into at least 2 separate VGAM precursor RNAs, VGAM56 precursor RNA and VGAM57 precursor RNA, herein schematically represented by VGAM1 PRECURSOR and VGAM2 PRECURSOR respectively, each of which VGAM precursor RNAs being a hairpin shaped RNA segment, corresponding to VGAM PRECURSOR RNA of FIG. 8.

[5136] The above mentioned VGAM precursor RNAs are diced by DICER COMPLEX of FIG. 8, yielding respective short RNA segments of about 22 nucleotides in length, VGAM56 RNA and VGAM57 RNA respectively, herein schematically represented by VGAM1 RNA and VGAM2 RNA respectively, each of which VGAM RNAs corresponding to VGAM RNA of FIG. 8.

[5137] VGAM56 RNA, herein schematically represented by VGAM1 binds complimentarily to a host target binding site located in an untranslated region of VGAM56 host target RNA, herein schematically represented by VGAM1 HOST TARGET RNA, which host target binding site corresponds to a host target binding site such as BINDING SITE 1, BINDING SITE II or BINDING SITE III of FIG. 1, thereby inhibiting translation of VGAM56 host target RNA, herein schematically represented by VGAM1 HOST TARGET RNA into VGAM56 host target protein, herein schematically represented by VGAM1 HOST TARGET PROTEIN, both of FIG. 1.

[5138] VGAM57 RNA, herein schematically represented by VGAM2 binds complimentarily to a host target binding site located in an untranslated region of VGAM57 host target RNA, herein schematically represented by VGAM2 HOST TARGET RNA, which host target binding site corresponds to a host target binding site such as BINDING SITE I, BINDING SITE II or BINDING SITE III of FIG. 1, thereby inhibiting translation of VGAM57 host target RNA, herein schematically represented by VGAM2 HOST TARGET RNA into VGAM57 host target protein, herein schematically represented by VGAM2 HOST TARGET PROTEIN, both of FIG. 1.

[5139] It is appreciated that a function of VGR370 gene, herein designated VGR GENE, is inhibition of expression of host target genes, as part of a novel viral mechanism of attacking a host. Accordingly, utilities of VGR370 gene include diagnosis, prevention and treatment of viral infection by. Specific functions, and accordingly utilities, of VGR370 gene, herein designated VGR GENE, correlate with, and may be deduced from, the identity of the host target genes, which are inhibited by VGAM RNAs comprised in the operon-like cluster of VGR370 gene: VGAM56 host target protein and VGAM57 host target protein, herein schematically represented by VGAM1 HOST TARGET PROTEIN and VGAM HOST TARGET PROTEIN respectively. The function of these host target genes is elaborated hereinabove with reference to VGAM56 and VGAM57

[5140] FIG. 9 further provides a conceptual description of novel bioinformatically detected regulatory viral gene, referred to here as Viral Genomic Record 371(VGR371) viral gene, which encodes an operon-like cluster of novel viral micro RNA-like genes, each of which in turn modulates expression of at least one host target gene, the function and utility of which at least one host target gene is known in the art.

[5141] VGR371 gene, herein designated VGR GENE, is a novel bioinformatically detected regulatory, non protein coding, RNA viral gene. The method by which VGR371 gene was detected is described hereinabove with reference to FIGS. 6-15.

[5142] VGR371 gene encodes VGR371 precursor RNA, herein designated VGR PRECURSOR RNA, an RNA molecule, typically several hundred nucleotides long.

[5143] VGR371 precursor RNA folds spatially, forming VGR371 folded precursor RNA, herein designated VGR FOLDED PRECURSOR RNA. It is appreciated that VGR371 folded precursor RNA, herein designated VGR FOLDED PRECURSOR RNA, comprises a plurality of what is known in the art as hairpin structures. These hairpin structures are due to the fact that the nucleotide sequence of VGR371 precursor RNA comprises a plurality of segments, the first half of each such segment having a nucleotide sequence which is at least a partial inversed-reversed sequence of the second half thereof, as is well known in the art.

[5144] VGR371 folded precursor RNA, herein designated VGR FOLDED PRECURSOR RNA, is naturally processed by cellular enzymatic activity into at least 8 separate VGAM precursor RNAs, VGAM58 precursor RNA, VGAM59 precursor RNA, VGAM60 precursor RNA, VGAM61 precursor RNA, VGAM62 precursor RNA, VGAM63 precursor RNA, VGAM64 precursor RNA and VGAM65 precursor RNA, herein schematically represented by VGAM1 PRECURSOR, VGAM2 PRECURSOR, VGAM3 PRECURSOR, VGAM4 PRECURSOR, VGAM5 PRECURSOR, VGAM6 PRECURSOR, VGAM7 PRECURSOR and VGAM8 PRECURSOR respectively, each of which VGAM precursor RNAs being a hairpin shaped RNA segment, corresponding to VGAM PRECURSOR RNA of FIG. 8.

[5145] The above mentioned VGAM precursor RNAs are diced by DICER COMPLEX of FIG. 8, yielding respective short RNA segments of about 22 nucleotides in length, VGAM58 RNA, VGAM59 RNA, VGAM60 RNA, VGAM61 RNA, VGAM62 RNA, VGAM63 RNA, VGAM64 RNA and VGAM65 RNA respectively, herein schematically represented by VGAM1 RNA, VGAM2 RNA, VGAM3 RNA, VGAM4 RNA, VGAM5 RNA, VGAM6 RNA, VGAM7 RNA and VGAM8 RNA respectively, each of which VGAM RNAs corresponding to VGAM RNA of FIG. 8.

[5146] VGAM58 RNA, herein schematically represented by VGAM1 binds complimentarily to a host target binding site located in an untranslated region of VGAM58 host target RNA, herein schematically represented by VGAM1 HOST TARGET RNA, which host target binding site corresponds to a host target binding site such as BINDING SITE I, BINDING SITE II or BINDING SITE III of FIG. 1, thereby inhibiting translation of VGAM58 host target RNA, herein schematically represented by VGAM1 HOST TARGET RNA into VGAM58 host target protein, herein schematically represented by VGAM1 HOST TARGET PROTEIN, both of FIG. 1.

[5147] VGAM59 RNA, herein schematically represented by VGAM2 binds complimentarily to a host target binding site located in an untranslated region of VGAM59 host target RNA, herein schematically represented by VGAM2 HOST TARGET RNA, which host target binding site corresponds to a host target binding site such as BINDING SITE I, BINDING SITE II or BINDING SITE III of FIG. 1, thereby inhibiting translation of VGAM59 host target RNA, herein schematically represented by VGAM2 HOST TARGET RNA into VGAM59 host target protein, herein schematically represented by VGAM2 HOST TARGET PROTEIN, both of FIG. 1.

[5148] VGAM60 RNA, herein schematically represented by VGAM3 binds complimentarily to a host target binding site located in an untranslated region of VGAM60 host target RNA, herein schematically represented by VGAM3 HOST TARGET RNA, which host target binding site corresponds to a host target binding site such as BINDING SITE I, BINDING SITE II or BINDING SITE III of FIG. 1, thereby inhibiting translation of VGAM60 host target RNA, herein schematically represented by VGAM3 HOST TARGET RNA into VGAM60 host target protein, herein schematically represented by VGAM3 HOST TARGET PROTEIN, both of FIG. 1.

[5149] VGAM61 RNA, herein schematically represented by VGAM4 binds complimentarily to a host target binding site located in an untranslated region of VGAM61 host target RNA, herein schematically represented by VGAM4 HOST TARGET RNA, which host target binding site corresponds to a host target binding site such as BINDING SITE I, BINDING SITE II or BINDING SITE III of FIG. 1, thereby inhibiting translation of VGAM61 host target RNA, herein schematically represented by VGAM4 HOST TARGET RNA into VGAM61 host target protein, herein schematically represented by VGAM4 HOST TARGET PROTEIN, both of FIG. 1.

[5150] VGAM62 RNA, herein schematically represented by VGAM5 binds complimentarily to a host target binding site located in an untranslated region of VGAM62 host target RNA, herein schematically represented by VGAM5 HOST TARGET RNA, which host target binding site corresponds to a host target binding site such as BINDING SITE I, BINDING SITE II or BINDING SITE III of FIG. 1, thereby inhibiting translation of VGAM62 host target RNA, herein schematically represented by VGAM5 HOST TARGET RNA into VGAM62 host target protein, herein schematically represented by VGAM5 HOST TARGET PROTEIN, both of FIG. 1.

[5151] VGAM63 RNA, herein schematically represented by VGAM6 binds complimentarily to a host target binding site located in an untranslated region of VGAM63 host target RNA, herein schematically represented by VGAM6 HOST TARGET RNA, which host target binding site corresponds to a host target binding site such as BINDING SITE I, BINDING SITE II or BINDING SITE III of FIG. 1, thereby inhibiting translation of VGAM63 host target RNA, herein schematically represented by VGAM6 HOST TARGET RNA into VGAM63 host target protein, herein schematically represented by VGAM6 HOST TARGET PROTEIN, both of FIG. 1.

[5152] VGAM64 RNA, herein schematically represented by VGAM7 binds complimentarily to a host target binding site located in an untranslated region of VGAM64 host target RNA, herein schematically represented by VGAM7 HOST TARGET RNA, which host target binding site corresponds to a host target binding site such as BINDING SITE I, BINDING SITE II or BINDING SITE III of FIG. 1, thereby inhibiting translation of VGAM64 host target RNA, herein schematically represented by VGAM7 HOST TARGET RNA into VGAM64 host target protein, herein schematically represented by VGAM7 HOST TARGET PROTEIN, both of FIG. 1.

[5153] VGAM65 RNA, herein schematically represented by VGAM8 binds complimentarily to a host target binding site located in an untranslated region of VGAM65 host target RNA, herein schematically represented by VGAM8 HOST TARGET RNA, which host target binding site corresponds to a host target binding site such as BINDING SITE I, BINDING SITE II or BINDING SITE III of FIG. 1, thereby inhibiting translation of VGAM65 host target RNA, herein schematically represented by VGAM8 HOST TARGET RNA into VGAM65 host target protein, herein schematically represented by VGAM8 HOST TARGET PROTEIN, both of FIG. 1.

[5154] It is appreciated that a function of VGR371 gene, herein designated VGR GENE, is inhibition of expression of host target genes, as part of a novel viral mechanism of attacking a host. Accordingly, utilities of VGR371 gene include diagnosis, prevention and treatment of viral infection by. Specific functions, and accordingly utilities, of VGR371 gene, herein designated VGR GENE, correlate with, and may be deduced from, the identity of the host target genes, which are inhibited by VGAM RNAs comprised in the operon-like cluster of VGR371 gene: VGAM58 host target protein, VGAM59 host target protein, VGAM60 host target protein, VGAM61 host target protein, VGAM62 host target protein, VGAM63 host target protein, VGAM64 host target protein and VGAM65 host target protein, herein schematically represented by VGAM1 HOST TARGET PROTEIN through VGAM HOST TARGET PROTEIN respectively. The function of these host target genes is elaborated hereinabove with reference to VGAM58, VGAM59, VGAM60, VGAM61, VGAM62, VGAM63, VGAM64 and VGAM65

[5155] FIG. 9 further provides a conceptual description of novel bioinformatically detected regulatory viral gene, referred to here as Viral Genomic Record 372(VGR372) viral gene, which encodes an operon-like cluster of novel viral micro RNA-like genes, each of which in turn modulates expression of at least one host target gene, the function and utility of which at least one host target gene is known in the art.

[5156] VGR372 gene, herein designated VGR GENE, is a novel bioinformatically detected regulatory, non protein coding, RNA viral gene. The method by which VGR372 gene was detected is described hereinabove with reference to FIGS. 6-15.

[5157] VGR372 gene encodes VGR372 precursor RNA, herein designated VGR PRECURSOR RNA, an RNA molecule, typically several hundred nucleotides long.

[5158] VGR372 precursor RNA folds spatially, forming VGR372 folded precursor RNA, herein designated VGR FOLDED PRECURSOR RNA. It is appreciated that VGR372 folded precursor RNA, herein designated VGR FOLDED PRECURSOR RNA, comprises a plurality of what is known in the art as hairpin structures. These hairpin structures are due to the fact that the nucleotide sequence of VGR372 precursor RNA comprises a plurality of segments, the first half of each such segment having a nucleotide sequence which is at least a partial inversed-reversed sequence of the second half thereof, as is well known in the art.

[5159] VGR372 folded precursor RNA, herein designated VGR FOLDED PRECURSOR RNA, is naturally processed by cellular enzymatic activity into at least 3 separate VGAM precursor RNAs, VGAM66 precursor RNA, VGAM67 precursor RNA and VGAM68 precursor RNA, herein schematically represented by VGAM1 PRECURSOR, VGAM2 PRECURSOR and VGAM3 PRECURSOR respectively, each of which VGAM precursor RNAs being a hairpin shaped RNA segment, corresponding to VGAM PRECURSOR RNA of FIG. 8.

[5160] The above mentioned VGAM precursor RNAs are diced by DICER COMPLEX of FIG. 8, yielding respective short RNA segments of about 22 nucleotides in length, VGAM66 RNA, VGAM67 RNA and VGAM68 RNA respectively, herein schematically represented by VGAM1 RNA, VGAM2 RNA and VGAM3 RNA respectively, each of which VGAM RNAs corresponding to VGAM RNA of FIG. 8.

[5161] VGAM66 RNA, herein schematically represented by VGAM1 binds complimentarily to a host target binding site located in an untranslated region of VGAM66 host target RNA, herein schematically represented by VGAM1 HOST TARGET RNA, which host target binding site corresponds to a host target binding site such as BINDING SITE 1, BINDING SITE II or BINDING SITE III of FIG. 1, thereby inhibiting translation of VGAM66 host target RNA, herein schematically represented by VGAM1 HOST TARGET RNA into VGAM66 host target protein, herein schematically represented by VGAM1 HOST TARGET PROTEIN, both of FIG. 1.

[5162] VGAM67 RNA, herein schematically represented by VGAM2 binds complimentarily to a host target binding site located in an untranslated region of VGAM67 host target RNA, herein schematically represented by VGAM2 HOST TARGET RNA, which host target binding site corresponds to a host target binding site such as BINDING SITE I, BINDING SITE II or BINDING SITE III of FIG. 1, thereby inhibiting translation of VGAM67 host target RNA, herein schematically represented by VGAM2 HOST TARGET RNA into VGAM67 host target protein, herein schematically represented by VGAM2 HOST TARGET PROTEIN, both of FIG. 1.

[5163] VGAM68 RNA, herein schematically represented by VGAM3 binds complimentarily to a host target binding site located in an untranslated region of VGAM68 host target RNA, herein schematically represented by VGAM3 HOST TARGET RNA, which host target binding site corresponds to a host target binding site such as BINDING SITE I, BINDING SITE II or BINDING SITE III of FIG. 1, thereby inhibiting translation of VGAM68 host target RNA, herein schematically represented by VGAM3 HOST TARGET RNA into VGAM68 host target protein, herein schematically represented by VGAM3 HOST TARGET PROTEIN, both of FIG. 1.

[5164] It is appreciated that a function of VGR372 gene, herein designated VGR GENE, is inhibition of expression of host target genes, as part of a novel viral mechanism of attacking a host. Accordingly, utilities of VGR372 gene include diagnosis, prevention and treatment of viral infection by. Specific functions, and accordingly utilities, of VGR372 gene, herein designated VGR GENE, correlate with, and may be deduced from, the identity of the host target genes, which are inhibited by VGAM RNAs comprised in the operon-like cluster of VGR372 gene: VGAM66 host target protein, VGAM67 host target protein and VGAM68 host target protein, herein schematically represented by VGAM1 HOST TARGET PROTEIN through VGAM HOST TARGET PROTEIN respectively. The function of these host target genes is elaborated hereinabove with reference to VGAM66, VGAM67 and VGAM68

[5165] FIG. 9 further provides a conceptual description of novel bioinformatically detected regulatory viral gene, referred to here as Viral Genomic Record 373(VGR373) viral gene, which encodes an operon-like cluster of novel viral micro RNA-like genes, each of which in turn modulates expression of at least one host target gene, the function and utility of which at least one host target gene is known in the art.

[5166] VGR373 gene, herein designated VGR GENE, is a novel bioinformatically detected regulatory, non protein coding, RNA viral gene. The method by which VGR373 gene was detected is described hereinabove with reference to FIGS. 6-15.

[5167] VGR373 gene encodes VGR373 precursor RNA, herein designated VGR PRECURSOR RNA, an RNA molecule, typically several hundred nucleotides long.

[5168] VGR373 precursor RNA folds spatially, forming VGR373 folded precursor RNA, herein designated VGR FOLDED PRECURSOR RNA. It is appreciated that VGR373 folded precursor RNA, herein designated VGR FOLDED PRECURSOR RNA, comprises a plurality of what is known in the art as hairpin structures. These hairpin structures are due to the fact that the nucleotide sequence of VGR373 precursor RNA comprises a plurality of segments, the first half of each such segment having a nucleotide sequence which is at least a partial inversed-reversed sequence of the second half thereof, as is well known in the art.

[5169] VGR373 folded precursor RNA, herein designated VGR FOLDED PRECURSOR RNA, is naturally processed by cellular enzymatic activity into at least 3 separate VGAM precursor RNAs, VGAM71 precursor RNA, VGAM72 precursor RNA and VGAM73 precursor RNA, herein schematically represented by VGAM1 PRECURSOR, VGAM2 PRECURSOR and VGAM3 PRECURSOR respectively, each of which VGAM precursor RNAs being a hairpin shaped RNA segment, corresponding to VGAM PRECURSOR RNA of FIG. 8.

[5170] The above mentioned VGAM precursor RNAs are diced by DICER COMPLEX of FIG. 8, yielding respective short RNA segments of about 22 nucleotides in length, VGAM71 RNA, VGAM72 RNA and VGAM73 RNA respectively, herein schematically represented by VGAM1 RNA, VGAM2 RNA and VGAM3 RNA respectively, each of which VGAM RNAs corresponding to VGAM RNA of FIG. 8.

[5171] VGAM71 RNA, herein schematically represented by VGAM1 binds complimentarily to a host target binding site located in an untranslated region of VGAM71 host target RNA, herein schematically represented by VGAM1 HOST TARGET RNA, which host target binding site corresponds to a host target binding site such as BINDING SITE I, BINDING SITE II or BINDING SITE III of FIG. 1, thereby inhibiting translation of VGAM71 host target RNA, herein schematically represented by VGAM1 HOST TARGET RNA into VGAM71 host target protein, herein schematically represented by VGAM1 HOST TARGET PROTEIN, both of FIG. 1.

[5172] VGAM72 RNA, herein schematically represented by VGAM2 binds complimentarily to a host target binding site located in an untranslated region of VGAM72 host target RNA, herein schematically represented by VGAM2 HOST TARGET RNA, which host target binding site corresponds to a host target binding site such as BINDING SITE I, BINDING SITE II or BINDING SITE III of FIG. 1, thereby inhibiting translation of VGAM72 host target RNA, herein schematically represented by VGAM2 HOST TARGET RNA into VGAM72 host target protein, herein schematically represented by VGAM2 HOST TARGET PROTEIN, both of FIG. 1.

[5173] VGAM73 RNA, herein schematically represented by VGAM3 binds complimentarily to a host target binding site located in an untranslated region of VGAM73 host target RNA, herein schematically represented by VGAM3 HOST TARGET RNA, which host target binding site corresponds to a host target binding site such as BINDING SITE I, BINDING SITE II or BINDING SITE III of FIG. 1, thereby inhibiting translation of VGAM73 host target RNA, herein schematically represented by VGAM3 HOST TARGET RNA into VGAM73 host target protein, herein schematically represented by VGAM3 HOST TARGET PROTEIN, both of FIG. 1.

[5174] It is appreciated that a function of VGR373 gene, herein designated VGR GENE, is inhibition of expression of host target genes, as part of a novel viral mechanism of attacking a host. Accordingly, utilities of VGR373 gene include diagnosis, prevention and treatment of viral infection by. Specific functions, and accordingly utilities, of VGR373 gene, herein designated VGR GENE, correlate with, and may be deduced from, the identity of the host target genes, which are inhibited by VGAM RNAs comprised in the operon-like cluster of VGR373 gene: VGAM71 host target protein, VGAM72 host target protein and VGAM73 host target protein, herein schematically represented by VGAM1 HOST TARGET PROTEIN through VGAM HOST TARGET PROTEIN respectively. The function of these host target genes is elaborated hereinabove with reference to VGAM71, VGAM72 and VGAM73

[5175] FIG. 9 further provides a conceptual description of novel bioinformatically detected regulatory viral gene, referred to here as Viral Genomic Record 374(VGR374) viral gene, which encodes an operon-like cluster of novel viral micro RNA-like genes, each of which in turn modulates expression of at least one host target gene, the function and utility of which at least one host target gene is known in the art.

[5176] VGR374 gene, herein designated VGR GENE, is a novel bioinformatically detected regulatory, non protein coding, RNA viral gene. The method by which VGR374 gene was detected is described hereinabove with reference to FIGS. 6-15.

[5177] VGR374 gene encodes VGR374 precursor RNA, herein designated VGR PRECURSOR RNA, an RNA molecule, typically several hundred nucleotides long.

[5178] VGR374 precursor RNA folds spatially, forming VGR374 folded precursor RNA, herein designated VGR FOLDED PRECURSOR RNA. It is appreciated that VGR374 folded precursor RNA, herein designated VGR FOLDED PRECURSOR RNA, comprises a plurality of what is known in the art as hairpin structures. These hairpin structures are due to the fact that the nucleotide sequence of VGR374 precursor RNA comprises a plurality of segments, the first half of each such segment having a nucleotide sequence which is at least a partial inversed-reversed sequence of the second half thereof, as is well known in the art.

[5179] VGR374 folded precursor RNA, herein designated VGR FOLDED PRECURSOR RNA, is naturally processed by cellular enzymatic activity into at least 2 separate VGAM precursor RNAs, VGAM74 precursor RNA and VGAM75 precursor RNA, herein schematically represented by VGAM1 PRECURSOR and VGAM2 PRECURSOR respectively, each of which VGAM precursor RNAs being a hairpin shaped RNA segment, corresponding to VGAM PRECURSOR RNA of FIG. 8.

[5180] The above mentioned VGAM precursor RNAs are diced by DICER COMPLEX of FIG. 8, yielding respective short RNA segments of about 22 nucleotides in length, VGAM74 RNA and VGAM75 RNA respectively, herein schematically represented by VGAM1 RNA and VGAM2 RNA respectively, each of which VGAM RNAs corresponding to VGAM RNA of FIG. 8.

[5181] VGAM74 RNA, herein schematically represented by VGAM1 binds complimentarily to a host target binding site located in an untranslated region of VGAM74 host target RNA, herein schematically represented by VGAM1 HOST TARGET RNA, which host target binding site corresponds to a host target binding site such as BINDING SITE I, BINDING SITE II or BINDING SITE III of FIG. 1, thereby inhibiting translation of VGAM74 host target RNA, herein schematically represented by VGAM1 HOST TARGET RNA into VGAM74 host target protein, herein schematically represented by VGAM1 HOST TARGET PROTEIN, both of FIG. 1.

[5182] VGAM75 RNA, herein schematically represented by VGAM2 binds complimentarily to a host target binding site located in an untranslated region of VGAM75 host target RNA, herein schematically represented by VGAM2 HOST TARGET RNA, which host target binding site corresponds to a host target binding site such as BINDING SITE I, BINDING SITE II or BINDING SITE III of FIG. 1, thereby inhibiting translation of VGAM75 host target RNA, herein schematically represented by VGAM2 HOST TARGET RNA into VGAM75 host target protein, herein schematically represented by VGAM2 HOST TARGET PROTEIN, both of FIG. 1.

[5183] It is appreciated that a function of VGR374 gene, herein designated VGR GENE, is inhibition of expression of host target genes, as part of a novel viral mechanism of attacking a host. Accordingly, utilities of VGR374 gene include diagnosis, prevention and treatment of viral infection by. Specific functions, and accordingly utilities, of VGR374 gene, herein designated VGR GENE, correlate with, and may be deduced from, the identity of the host target genes, which are inhibited by VGAM RNAs comprised in the operon-like cluster of VGR374 gene: VGAM74 host target protein and VGAM75 host target protein, herein schematically represented by VGAM1 HOST TARGET PROTEIN and VGAM HOST TARGET PROTEIN respectively. The function of these host target genes is elaborated hereinabove with reference to VGAM74 and VGAM75

[5184] FIG. 9 further provides a conceptual description of novel bioinformatically detected regulatory viral gene, referred to here as Viral Genomic Record 375(VGR375) viral gene, which encodes an operon-like cluster of novel viral micro RNA-like genes, each of which in turn modulates expression of at least one host target gene, the function and utility of which at least one host target gene is known in the art.

[5185] VGR375 gene, herein designated VGR GENE, is a novel bioinformatically detected regulatory, non protein coding, RNA viral gene. The method by which VGR375 gene was detected is described hereinabove with reference to FIGS. 6-15.

[5186] VGR375 gene encodes VGR375 precursor RNA, herein designated VGR PRECURSOR RNA, an RNA molecule, typically several hundred nucleotides long.

[5187] VGR375 precursor RNA folds spatially, forming VGR375 folded precursor RNA, herein designated VGR FOLDED PRECURSOR RNA. It is appreciated that VGR375 folded precursor RNA, herein designated VGR FOLDED PRECURSOR RNA, comprises a plurality of what is known in the art as hairpin structures. These hairpin structures are due to the fact that the nucleotide sequence of VGR375 precursor RNA comprises a plurality of segments, the first half of each such segment having a nucleotide sequence which is at least a partial inversed-reversed sequence of the second half thereof, as is well known in the art.

[5188] VGR375 folded precursor RNA, herein designated VGR FOLDED PRECURSOR RNA, is naturally processed by cellular enzymatic activity into at least 3 separate VGAM precursor RNAs, VGAM77 precursor RNA, VGAM78 precursor RNA and VGAM79 precursor RNA, herein schematically represented by VGAM1 PRECURSOR, VGAM2 PRECURSOR and VGAM3 PRECURSOR respectively, each of which VGAM precursor RNAs being a hairpin shaped RNA segment, corresponding to VGAM PRECURSOR RNA of FIG. 8.

[5189] The above mentioned VGAM precursor RNAs are diced by DICER COMPLEX of FIG. 8, yielding respective short RNA segments of about 22 nucleotides in length, VGAM77 RNA, VGAM78 RNA and VGAM79 RNA respectively, herein schematically represented by VGAM1 RNA, VGAM2 RNA and VGAM3 RNA respectively, each of which VGAM RNAs corresponding to VGAM RNA of FIG. 8.

[5190] VGAM77 RNA, herein schematically represented by VGAM1 binds complimentarily to a host target binding site located in an untranslated region of VGAM77 host target RNA, herein schematically represented by VGAM1 HOST TARGET RNA, which host target binding site corresponds to a host target binding site such as BINDING SITE I, BINDING SITE II or BINDING SITE III of FIG. 1, thereby inhibiting translation of VGAM77 host target RNA, herein schematically represented by VGAM1 HOST TARGET RNA into VGAM77 host target protein, herein schematically represented by VGAM1 HOST TARGET PROTEIN, both of FIG. 1.

[5191] VGAM78 RNA, herein schematically represented by VGAM2 binds complimentarily to a host target binding site located in an untranslated region of VGAM78 host target RNA, herein schematically represented by VGAM2 HOST TARGET RNA, which host target binding site corresponds to a host target binding site such as BINDING SITE I, BINDING SITE II or BINDING SITE III of FIG. 1, thereby inhibiting translation of VGAM78 host target RNA, herein schematically represented by VGAM2 HOST TARGET RNA into VGAM78 host target protein, herein schematically represented by VGAM2 HOST TARGET PROTEIN, both of FIG. 1.

[5192] VGAM79 RNA, herein schematically represented by VGAM3 binds complimentarily to a host target binding site located in an untranslated region of VGAM79 host target RNA, herein schematically represented by VGAM3 HOST TARGET RNA, which host target binding site corresponds to a host target binding site such as BINDING SITE I, BINDING SITE II or BINDING SITE III of FIG. 1, thereby inhibiting translation of VGAM79 host target RNA, herein schematically represented by VGAM3 HOST TARGET RNA into VGAM79 host target protein, herein schematically represented by VGAM3 HOST TARGET PROTEIN, both of FIG. 1.

[5193] It is appreciated that a function of VGR375 gene, herein designated VGR GENE, is inhibition of expression of host target genes, as part of a novel viral mechanism of attacking a host. Accordingly, utilities of VGR375 gene include diagnosis, prevention and treatment of viral infection by. Specific functions, and accordingly utilities, of VGR375 gene, herein designated VGR GENE, correlate with, and may be deduced from, the identity of the host target genes, which are inhibited by VGAM RNAs comprised in the operon-like cluster of VGR375 gene: VGAM77 host target protein, VGAM78 host target protein and VGAM79 host target protein, herein schematically represented by VGAM1 HOST TARGET PROTEIN through VGAM HOST TARGET PROTEIN respectively. The function of these host target genes is elaborated hereinabove with reference to VGAM77, VGAM78 and VGAM79

[5194] FIG. 9 further provides a conceptual description of novel bioinformatically detected regulatory viral gene, referred to here as Viral Genomic Record 376(VGR376) viral gene, which encodes an operon-like cluster of novel viral micro RNA-like genes, each of which in turn modulates expression of at least one host target gene, the function and utility of which at least one host target gene is known in the art.

[5195] VGR376 gene, herein designated VGR GENE, is a novel bioinformatically detected regulatory, non protein coding, RNA viral gene. The method by which VGR376 gene was detected is described hereinabove with reference to FIGS. 6-15.

[5196] VGR376 gene encodes VGR376 precursor RNA, herein designated VGR PRECURSOR RNA, an RNA molecule, typically several hundred nucleotides long.

[5197] VGR376 precursor RNA folds spatially, forming VGR376 folded precursor RNA, herein designated VGR FOLDED PRECURSOR RNA. It is appreciated that VGR376 folded precursor RNA, herein designated VGR FOLDED PRECURSOR RNA, comprises a plurality of what is known in the art as hairpin structures. These hairpin structures are due to the fact that the nucleotide sequence of VGR376 precursor RNA comprises a plurality of segments, the first half of each such segment having a nucleotide sequence which is at least a partial inversed-reversed sequence of the second half thereof, as is well known in the art.

[5198] VGR376 folded precursor RNA, herein designated VGR FOLDED PRECURSOR RNA, is naturally processed by cellular enzymatic activity into at least 8 separate VGAM precursor RNAs, VGAM81 precursor RNA, VGAM82 precursor RNA, VGAM83 precursor RNA, VGAM84 precursor RNA, VGAM85 precursor RNA, VGAM86 precursor RNA, VGAM87 precursor RNA and VGAM88 precursor RNA, herein schematically represented by VGAM1 PRECURSOR, VGAM2 PRECURSOR, VGAM3 PRECURSOR, VGAM4 PRECURSOR, VGAM5 PRECURSOR, VGAM6 PRECURSOR, VGAM7 PRECURSOR and VGAM8 PRECURSOR respectively, each of which VGAM precursor RNAs being a hairpin shaped RNA segment, corresponding to VGAM PRECURSOR RNA of FIG. 8.

[5199] The above mentioned VGAM precursor RNAs are diced by DICER COMPLEX of FIG. 8, yielding respective short RNA segments of about 22 nucleotides in length, VGAM81 RNA, VGAM82 RNA, VGAM83 RNA, VGAM84 RNA, VGAM85 RNA, VGAM86 RNA, VGAM87 RNA and VGAM88 RNA respectively, herein schematically represented by VGAM1 RNA, VGAM2 RNA, VGAM3 RNA, VGAM4 RNA, VGAM5 RNA, VGAM6 RNA, VGAM7 RNA and VGAM8 RNA respectively, each of which VGAM RNAs corresponding to VGAM RNA of FIG. 8.

[5200] VGAM81 RNA, herein schematically represented by VGAM1 binds complimentarily to a host target binding site located in an untranslated region of VGAM81 host target RNA, herein schematically represented by VGAM1 HOST TARGET RNA, which host target binding site corresponds to a host target binding site such as BINDING SITE I, BINDING SITE II or BINDING SITE III of FIG. 1, thereby inhibiting translation of VGAM81 host target RNA, herein schematically represented by VGAM1 HOST TARGET RNA into VGAM81 host target protein, herein schematically represented by VGAM1 HOST TARGET PROTEIN, both of FIG. 1.

[5201] VGAM82 RNA, herein schematically represented by VGAM2 binds complimentarily to a host target binding site located in an untranslated region of VGAM82 host target RNA, herein schematically represented by VGAM2 HOST TARGET RNA, which host target binding site corresponds to a host target binding site such as BINDING SITE I, BINDING SITE II or BINDING SITE III of FIG. 1, thereby inhibiting translation of VGAM82 host target RNA, herein schematically represented by VGAM2 HOST TARGET RNA into VGAM82 host target protein, herein schematically represented by VGAM2 HOST TARGET PROTEIN, both of FIG. 1.

[5202] VGAM83 RNA, herein schematically represented by VGAM3 binds complimentarily to a host target binding site located in an untranslated region of VGAM83 host target RNA, herein schematically represented by VGAM3 HOST TARGET RNA, which host target binding site corresponds to a host target binding site such as BINDING SITE 1, BINDING SITE II or BINDING SITE III of FIG. 1, thereby inhibiting translation of VGAM83 host target RNA, herein schematically represented by VGAM3 HOST TARGET RNA into VGAM83 host target protein, herein schematically represented by VGAM3 HOST TARGET PROTEIN, both of FIG. 1.

[5203] VGAM84 RNA, herein schematically represented by VGAM4 binds complimentarily to a host target binding site located in an untranslated region of VGAM84 host target RNA, herein schematically represented by VGAM4 HOST TARGET RNA, which host target binding site corresponds to a host target binding site such as BINDING SITE 1, BINDING SITE II or BINDING SITE III of FIG. 1, thereby inhibiting translation of VGAM84 host target RNA, herein schematically represented by VGAM4 HOST TARGET RNA into VGAM84 host target protein, herein schematically represented by VGAM4 HOST TARGET PROTEIN, both of FIG. 1.

[5204] VGAM85 RNA, herein schematically represented by VGAM5 binds complimentarily to a host target binding site located in an untranslated region of VGAM85 host target RNA, herein schematically represented by VGAM5 HOST TARGET RNA, which host target binding site corresponds to a host target binding site such as BINDING SITE 1, BINDING SITE II or BINDING SITE III of FIG. 1, thereby inhibiting translation of VGAM85 host target RNA, herein schematically represented by VGAM5 HOST TARGET RNA into VGAM85 host target protein, herein schematically represented by VGAM5 HOST TARGET PROTEIN, both of FIG. 1.

[5205] VGAM86 RNA, herein schematically represented by VGAM6 binds complimentarily to a host target binding site located in an untranslated region of VGAM86 host target RNA, herein schematically represented by VGAM6 HOST TARGET RNA, which host target binding site corresponds to a host target binding site such as BINDING SITE 1, BINDING SITE II or BINDING SITE III of FIG. 1, thereby inhibiting translation of VGAM86 host target RNA, herein schematically represented by VGAM6 HOST TARGET RNA into VGAM86 host target protein, herein schematically represented by VGAM6 HOST TARGET PROTEIN, both of FIG. 1.

[5206] VGAM87 RNA, herein schematically represented by VGAM7 binds complimentarily to a host target binding site located in an untranslated region of VGAM87 host target RNA, herein schematically represented by VGAM7 HOST TARGET RNA, which host target binding site corresponds to a host target binding site such as BINDING SITE 1, BINDING SITE II or BINDING SITE III of FIG. 1, thereby inhibiting translation of VGAM87 host target RNA, herein schematically represented by VGAM7 HOST TARGET RNA into VGAM87 host target protein, herein schematically represented by VGAM7 HOST TARGET PROTEIN, both of FIG. 1.

[5207] VGAM88 RNA, herein schematically represented by VGAM8 binds complimentarily to a host target binding site located in an untranslated region of VGAM88 host target RNA, herein schematically represented by VGAM8 HOST TARGET RNA, which host target binding site corresponds to a host target binding site such as BINDING SITE 1, BINDING SITE II or BINDING SITE III of FIG. 1, thereby inhibiting translation of VGAM88 host target RNA, herein schematically represented by VGAM8 HOST TARGET RNA into VGAM88 host target protein, herein schematically represented by VGAM8 HOST TARGET PROTEIN, both of FIG. 1.

[5208] It is appreciated that a function of VGR376 gene, herein designated VGR GENE, is inhibition of expression of host target genes, as part of a novel viral mechanism of attacking a host. Accordingly, utilities of VGR376 gene include diagnosis, prevention and treatment of viral infection by. Specific functions, and accordingly utilities, of VGR376 gene, herein designated VGR GENE, correlate with, and may be deduced from, the identity of the host target genes, which are inhibited by VGAM RNAs comprised in the operon-like cluster of VGR376 gene: VGAM81 host target protein, VGAM82 host target protein, VGAM83 host target protein, VGAM84 host target protein, VGAM85 host target protein, VGAM86 host target protein, VGAM87 host target protein and VGAM88 host target protein, herein schematically represented by VGAM1 HOST TARGET PROTEIN through VGAM HOST TARGET PROTEIN respectively. The function of these host target genes is elaborated hereinabove with reference to VGAM81, VGAM82, VGAM83, VGAM84, VGAM85, VGAM86, VGAM87 and VGAM88

[5209] FIG. 9 further provides a conceptual description of novel bioinformatically detected regulatory viral gene, referred to here as Viral Genomic Record 377(VGR377) viral gene, which encodes an operon-like cluster of novel viral micro RNA-like genes, each of which in turn modulates expression of at least one host target gene, the function and utility of which at least one host target gene is known in the art.

[5210] VGR377 gene, herein designated VGR GENE, is a novel bioinformatically detected regulatory, non protein coding, RNA viral gene. The method by which VGR377 gene was detected is described hereinabove with reference to FIGS. 6-15.

[5211] VGR377 gene encodes VGR377 precursor RNA, herein designated VGR PRECURSOR RNA, an RNA molecule, typically several hundred nucleotides long.

[5212] VGR377 precursor RNA folds spatially, forming VGR377 folded precursor RNA, herein designated VGR FOLDED PRECURSOR RNA. It is appreciated that VGR377 folded precursor RNA, herein designated VGR FOLDED PRECURSOR RNA, comprises a plurality of what is known in the art as hairpin structures. These hairpin structures are due to the fact that the nucleotide sequence of VGR377 precursor RNA comprises a plurality of segments, the first half of each such segment having a nucleotide sequence which is at least a partial inversed-reversed sequence of the second half thereof, as is well known in the art.

[5213] VGR377 folded precursor RNA, herein designated VGR FOLDED PRECURSOR RNA, is naturally processed by cellular enzymatic activity into at least 7 separate VGAM precursor RNAs, VGAM91 precursor RNA, VGAM92 precursor RNA, VGAM93 precursor RNA, VGAM94 precursor RNA, VGAM95 precursor RNA, VGAM96 precursor RNA and VGAM97 precursor RNA, herein schematically represented by VGAM1 PRECURSOR, VGAM2 PRECURSOR, VGAM3 PRECURSOR, VGAM4 PRECURSOR, VGAM5 PRECURSOR, VGAM6 PRECURSOR and VGAM7 PRECURSOR respectively, each of which VGAM precursor RNAs being a hairpin shaped RNA segment, corresponding to VGAM PRECURSOR RNA of FIG. 8.

[5214] The above mentioned VGAM precursor RNAs are diced by DICER COMPLEX of FIG. 8, yielding respective short RNA segments of about 22 nucleotides in length, VGAM91 RNA, VGAM92 RNA, VGAM93 RNA, VGAM94 RNA, VGAM95 RNA, VGAM96 RNA and VGAM97 RNA respectively, herein schematically represented by VGAM1 RNA, VGAM2 RNA, VGAM3 RNA, VGAM4 RNA, VGAM5 RNA, VGAM6 RNA and VGAM7 RNA respectively, each of which VGAM RNAs corresponding to VGAM RNA of FIG. 8.

[5215] VGAM91 RNA, herein schematically represented by VGAM1 binds complimentarily to a host target binding site located in an untranslated region of VGAM91 host target RNA, herein schematically represented by VGAM1 HOST TARGET RNA, which host target binding site corresponds to a host target binding site such as BINDING SITE I, BINDING SITE II or BINDING SITE III of FIG. 1, thereby inhibiting translation of VGAM91 host target RNA, herein schematically represented by VGAM1 HOST TARGET RNA into VGAM91 host target protein, herein schematically represented by VGAM1 HOST TARGET PROTEIN, both of FIG. 1.

[5216] VGAM92 RNA, herein schematically represented by VGAM2 binds complimentarily to a host target binding site located in an untranslated region of VGAM92 host target RNA, herein schematically represented by VGAM2 HOST TARGET RNA, which host target binding site corresponds to a host target binding site such as BINDING SITE I, BINDING SITE II or BINDING SITE III of FIG. 1, thereby inhibiting translation of VGAM92 host target RNA, herein schematically represented by VGAM2 HOST TARGET RNA into VGAM92 host target protein, herein schematically represented by VGAM2 HOST TARGET PROTEIN, both of FIG. 1.

[5217] VGAM93 RNA, herein schematically represented by VGAM3 binds complimentarily to a host target binding site located in an untranslated region of VGAM93 host target RNA, herein schematically represented by VGAM3 HOST TARGET RNA, which host target binding site corresponds to a host target binding site such as BINDING SITE I, BINDING SITE II or BINDING SITE III of FIG. 1, thereby inhibiting translation of VGAM93 host target RNA, herein schematically represented by VGAM3 HOST TARGET RNA into VGAM93 host target protein, herein schematically represented by VGAM3 HOST TARGET PROTEIN, both of FIG. 1.

[5218] VGAM94 RNA, herein schematically represented by VGAM4 binds complimentarily to a host target binding site located in an untranslated region of VGAM94 host target RNA, herein schematically represented by VGAM4 HOST TARGET RNA, which host target binding site corresponds to a host target binding site such as BINDING SITE I, BINDING SITE II or BINDING SITE III of FIG. 1, thereby inhibiting translation of VGAM94 host target RNA, herein schematically represented by VGAM4 HOST TARGET RNA into VGAM94 host target protein, herein schematically represented by VGAM4 HOST TARGET PROTEIN, both of FIG. 1.

[5219] VGAM95 RNA, herein schematically represented by VGAM5 binds complimentarily to a host target binding site located in an untranslated region of VGAM95 host target RNA, herein schematically represented by VGAM5 HOST TARGET RNA, which host target binding site corresponds to a host target binding site such as BINDING SITE I, BINDING SITE II or BINDING SITE III of FIG. 1, thereby inhibiting translation of VGAM95 host target RNA, herein schematically represented by VGAM5 HOST TARGET RNA into VGAM95 host target protein, herein schematically represented by VGAM5 HOST TARGET PROTEIN, both of FIG. 1.

[5220] VGAM96 RNA, herein schematically represented by VGAM6 binds complimentarily to a host target binding site located in an untranslated region of VGAM96 host target RNA, herein schematically represented by VGAM6 HOST TARGET RNA, which host target binding site corresponds to a host target binding site such as BINDING SITE I, BINDING SITE II or BINDING SITE III of FIG. 1, thereby inhibiting translation of VGAM96 host target RNA, herein schematically represented by VGAM6 HOST TARGET RNA into VGAM96 host target protein, herein schematically represented by VGAM6 HOST TARGET PROTEIN, both of FIG. 1.

[5221] VGAM97 RNA, herein schematically represented by VGAM7 binds complimentarily to a host target binding site located in an untranslated region of VGAM97 host target RNA, herein schematically represented by VGAM7 HOST TARGET RNA, which host target binding site corresponds to a host target binding site such as BINDING SITE 1, BINDING SITE II or BINDING SITE III of FIG. 1, thereby inhibiting translation of VGAM97 host target RNA, herein schematically represented by VGAM7 HOST TARGET RNA into VGAM97 host target protein, herein schematically represented by VGAM7 HOST TARGET PROTEIN, both of FIG. 1.

[5222] It is appreciated that a function of VGR377 gene, herein designated VGR GENE, is inhibition of expression of host target genes, as part of a novel viral mechanism of attacking a host. Accordingly, utilities of VGR377 gene include diagnosis, prevention and treatment of viral infection by. Specific functions, and accordingly utilities, of VGR377 gene, herein designated VGR GENE, correlate with, and may be deduced from, the identity of the host target genes, which are inhibited by VGAM RNAs comprised in the operon-like cluster of VGR377 gene: VGAM91 host target protein, VGAM92 host target protein, VGAM93 host target protein, VGAM94 host target protein, VGAM95 host target protein, VGAM96 host target protein and VGAM97 host target protein, herein schematically represented by VGAM1 HOST TARGET PROTEIN through VGAM HOST TARGET PROTEIN respectively. The function of these host target genes is elaborated hereinabove with reference to VGAM91, VGAM92, VGAM93, VGAM94, VGAM95, VGAM96 and VGAM97

[5223] FIG. 9 further provides a conceptual description of novel bioinformatically detected regulatory viral gene, referred to here as Viral Genomic Record 378(VGR378) viral gene, which encodes an operon-like cluster of novel viral micro RNA-like genes, each of which in turn modulates expression of at least one host target gene, the function and utility of which at least one host target gene is known in the art.

[5224] VGR378 gene, herein designated VGR GENE, is a novel bioinformatically detected regulatory, non protein coding, RNA viral gene. The method by which VGR378 gene was detected is described hereinabove with reference to FIGS. 6-15.

[5225] VGR378 gene encodes VGR378 precursor RNA, herein designated VGR PRECURSOR RNA, an RNA molecule, typically several hundred nucleotides long.

[5226] VGR378 precursor RNA folds spatially, forming VGR378 folded precursor RNA, herein designated VGR FOLDED PRECURSOR RNA. It is appreciated that VGR378 folded precursor RNA, herein designated VGR FOLDED PRECURSOR RNA, comprises a plurality of what is known in the art as hairpin structures. These hairpin structures are due to the fact that the nucleotide sequence of VGR378 precursor RNA comprises a plurality of segments, the first half of each such segment having a nucleotide sequence which is at least a partial inversed-reversed sequence of the second half thereof, as is well known in the art.

[5227] VGR378 folded precursor RNA, herein designated VGR FOLDED PRECURSOR RNA, is naturally processed by cellular enzymatic activity into at least 2 separate VGAM precursor RNAs, VGAM99 precursor RNA and VGAM100 precursor RNA, herein schematically represented by VGAM1 PRECURSOR and VGAM2 PRECURSOR respectively, each of which VGAM precursor RNAs being a hairpin shaped RNA segment, corresponding to VGAM PRECURSOR RNA of FIG. 8.

[5228] The above mentioned VGAM precursor RNAs are diced by DICER COMPLEX of FIG. 8, yielding respective short RNA segments of about 22 nucleotides in length, VGAM99 RNA and VGAM100 RNA respectively, herein schematically represented by VGAM1 RNA and VGAM2 RNA respectively, each of which VGAM RNAs corresponding to VGAM RNA of FIG. 8.

[5229] VGAM99 RNA, herein schematically represented by VGAM1 binds complimentarily to a host target binding site located in an untranslated region of VGAM99 host target RNA, herein schematically represented by VGAM1 HOST TARGET RNA, which host target binding site corresponds to a host target binding site such as BINDING SITE 1, BINDING SITE II or BINDING SITE III of FIG. 1, thereby inhibiting translation of VGAM99 host target RNA, herein schematically represented by VGAM1 HOST TARGET RNA into VGAM99 host target protein, herein schematically represented by VGAM1 HOST TARGET PROTEIN, both of FIG. 1.

[5230] VGAM100 RNA, herein schematically represented by VGAM2 binds complimentarily to a host target binding site located in an untranslated region of VGAM100 host target RNA, herein schematically represented by VGAM2 HOST TARGET RNA, which host target binding site corresponds to a host target binding site such as BINDING SITE I, BINDING SITE II or BINDING SITE III of FIG. 1, thereby inhibiting translation of VGAM100 host target RNA, herein schematically represented by VGAM2 HOST TARGET RNA into VGAM100 host target protein, herein schematically represented by VGAM2 HOST TARGET PROTEIN, both of FIG. 1.

[5231] It is appreciated that a function of VGR378 gene, herein designated VGR GENE, is inhibition of expression of host target genes, as part of a novel viral mechanism of attacking a host. Accordingly, utilities of VGR378 gene include diagnosis, prevention and treatment of viral infection by. Specific functions, and accordingly utilities, of VGR378 gene, herein designated VGR GENE, correlate with, and may be deduced from, the identity of the host target genes, which are inhibited by VGAM RNAs comprised in the operon-like cluster of VGR378 gene: VGAM99 host target protein and VGAM100 host target protein, herein schematically represented by VGAM1 HOST TARGET PROTEIN and VGAM HOST TARGET PROTEIN respectively. The function of these host target genes is elaborated hereinabove with reference to VGAM99 and VGAM100

[5232] FIG. 9 further provides a conceptual description of novel bioinformatically detected regulatory viral gene, referred to here as Viral Genomic Record 379(VGR379) viral gene, which encodes an operon-like cluster of novel viral micro RNA-like genes, each of which in turn modulates expression of at least one host target gene, the function and utility of which at least one host target gene is known in the art.

[5233] VGR379 gene, herein designated VGR GENE, is a novel bioinformatically detected regulatory, non protein coding, RNA viral gene. The method by which VGR379 gene was detected is described hereinabove with reference to FIGS. 6-15.

[5234] VGR379 gene encodes VGR379 precursor RNA, herein designated VGR PRECURSOR RNA, an RNA molecule, typically several hundred nucleotides long.

[5235] VGR379 precursor RNA folds spatially, forming VGR379 folded precursor RNA, herein designated VGR FOLDED PRECURSOR RNA. It is appreciated that VGR379 folded precursor RNA, herein designated VGR FOLDED PRECURSOR RNA, comprises a plurality of what is known in the art as hairpin structures. These hairpin structures are due to the fact that the nucleotide sequence of VGR379 precursor RNA comprises a plurality of segments, the first half of each such segment having a nucleotide sequence which is at least a partial inversed-reversed sequence of the second half thereof, as is well known in the art.

[5236] VGR379 folded precursor RNA, herein designated VGR FOLDED PRECURSOR RNA, is naturally processed by cellular enzymatic activity into at least 3 separate VGAM precursor RNAs, VGAM101 precursor RNA, VGAM102 precursor RNA and VGAM103 precursor RNA, herein schematically represented by VGAM1 PRECURSOR, VGAM2 PRECURSOR and VGAM3 PRECURSOR respectively, each of which VGAM precursor RNAs being a hairpin shaped RNA segment, corresponding to VGAM PRECURSOR RNA of FIG. 8.

[5237] The above mentioned VGAM precursor RNAs are diced by DICER COMPLEX of FIG. 8, yielding respective short RNA segments of about 22 nucleotides in length, VGAM101 RNA, VGAM102 RNA and VGAM103 RNA respectively, herein schematically represented by VGAM1 RNA, VGAM2 RNA and VGAM3 RNA respectively, each of which VGAM RNAs corresponding to VGAM RNA of FIG. 8.

[5238] VGAM101 RNA, herein schematically represented by VGAM1 binds complimentarily to a host target binding site located in an untranslated region of VGAM101 host target RNA, herein schematically represented by VGAM1 HOST TARGET RNA, which host target binding site corresponds to a host target binding site such as BINDING SITE 1, BINDING SITE II or BINDING SITE III of FIG. 1, thereby inhibiting translation of VGAM101 host target RNA, herein schematically represented by VGAM1 HOST TARGET RNA into VGAM101 host target protein, herein schematically represented by VGAM1 HOST TARGET PROTEIN, both of FIG. 1.

[5239] VGAM102 RNA, herein schematically represented by VGAM2 binds complimentarily to a host target binding site located in an untranslated region of VGAM102 host target RNA, herein schematically represented by VGAM2 HOST TARGET RNA, which host target binding site corresponds to a host target binding site such as BINDING SITE 1, BINDING SITE II or BINDING SITE III of FIG. 1, thereby inhibiting translation of VGAM102 host target RNA, herein schematically represented by VGAM2 HOST TARGET RNA into VGAM102 host target protein, herein schematically represented by VGAM2 HOST TARGET PROTEIN, both of FIG. 1.

[5240] VGAM103 RNA, herein schematically represented by VGAM3 binds complimentarily to a host target binding site located in an untranslated region of VGAM103 host target RNA, herein schematically represented by VGAM3 HOST TARGET RNA, which host target binding site corresponds to a host target binding site such as BINDING SITE 1, BINDING SITE II or BINDING SITE III of FIG. 1, thereby inhibiting translation of VGAM103 host target RNA, herein schematically represented by VGAM3 HOST TARGET RNA into VGAM103 host target protein, herein schematically represented by VGAM3 HOST TARGET PROTEIN, both of FIG. 1.

[5241] It is appreciated that a function of VGR379 gene, herein designated VGR GENE, is inhibition of expression of host target genes, as part of a novel viral mechanism of attacking a host. Accordingly, utilities of VGR379 gene include diagnosis, prevention and treatment of viral infection by. Specific functions, and accordingly utilities, of VGR379 gene, herein designated VGR GENE, correlate with, and may be deduced from, the identity of the host target genes, which are inhibited by VGAM RNAs comprised in the operon-like cluster of VGR379 gene: VGAM101 host target protein, VGAM102 host target protein and VGAM103 host target protein, herein schematically represented by VGAM1 HOST TARGET PROTEIN through VGAM HOST TARGET PROTEIN respectively. The function of these host target genes is elaborated hereinabove with reference to VGAM101, VGAM102 and VGAM103

[5242] FIG. 9 further provides a conceptual description of novel bioinformatically detected regulatory viral gene, referred to here as Viral Genomic Record 380(VGR380) viral gene, which encodes an operon-like cluster of novel viral micro RNA-like genes, each of which in turn modulates expression of at least one host target gene, the function and utility of which at least one host target gene is known in the art.

[5243] VGR380 gene, herein designated VGR GENE, is a novel bioinformatically detected regulatory, non protein coding, RNA viral gene. The method by which VGR380 gene was detected is described hereinabove with reference to FIGS. 6-15.

[5244] VGR380 gene encodes VGR380 precursor RNA, herein designated VGR PRECURSOR RNA, an RNA molecule, typically several hundred nucleotides long.

[5245] VGR380 precursor RNA folds spatially, forming VGR380 folded precursor RNA, herein designated VGR FOLDED PRECURSOR RNA. It is appreciated that VGR380 folded precursor RNA, herein designated VGR FOLDED PRECURSOR RNA, comprises a plurality of what is known in the art as hairpin structures. These hairpin structures are due to the fact that the nucleotide sequence of VGR380 precursor RNA comprises a plurality of segments, the first half of each such segment having a nucleotide sequence which is at least a partial inversed-reversed sequence of the second half thereof, as is well known in the art.

[5246] VGR380 folded precursor RNA, herein designated VGR FOLDED PRECURSOR RNA, is naturally processed by cellular enzymatic activity into at least 5 separate VGAM precursor RNAs, VGAM104 precursor RNA, VGAM105 precursor RNA, VGAM106 precursor RNA, VGAM107 precursor RNA and VGAM108 precursor RNA, herein schematically represented by VGAM1 PRECURSOR, VGAM2 PRECURSOR, VGAM3 PRECURSOR, VGAM4 PRECURSOR and VGAM5 PRECURSOR respectively, each of which VGAM precursor RNAs being a hairpin shaped RNA segment, corresponding to VGAM PRECURSOR RNA of FIG. 8.

[5247] The above mentioned VGAM precursor RNAs are diced by DICER COMPLEX of FIG. 8, yielding respective short RNA segments of about 22 nucleotides in length, VGAM104 RNA, VGAM105 RNA, VGAM106 RNA, VGAM107 RNA and VGAM108 RNA respectively, herein schematically represented by VGAM1 RNA, VGAM2 RNA, VGAM3 RNA, VGAM4 RNA and VGAM5 RNA respectively, each of which VGAM RNAs corresponding to VGAM RNA of FIG. 8.

[5248] VGAM104 RNA, herein schematically represented by VGAM1 binds complimentarily to a host target binding site located in an untranslated region of VGAM104 host target RNA, herein schematically represented by VGAM1 HOST TARGET RNA, which host target binding site corresponds to a host target binding site such as BINDING SITE 1, BINDING SITE II or BINDING SITE III of FIG. 1, thereby inhibiting translation of VGAM104 host target RNA, herein schematically represented by VGAM1 HOST TARGET RNA into VGAM104 host target protein, herein schematically represented by VGAM1 HOST TARGET PROTEIN, both of FIG. 1.

[5249] VGAM105 RNA, herein schematically represented by VGAM2 binds complimentarily to a host target binding site located in an untranslated region of VGAM105 host target RNA, herein schematically represented by VGAM2 HOST TARGET RNA, which host target binding site corresponds to a host target binding site such as BINDING SITE 1, BINDING SITE II or BINDING SITE III of FIG. 1, thereby inhibiting translation of VGAM105 host target RNA, herein schematically represented by VGAM2 HOST TARGET RNA into VGAM105 host target protein, herein schematically represented by VGAM2 HOST TARGET PROTEIN, both of FIG. 1.

[5250] VGAM106 RNA, herein schematically represented by VGAM3 binds complimentarily to a host target binding site located in an untranslated region of VGAM106 host target RNA, herein schematically represented by VGAM3 HOST TARGET RNA, which host target binding site corresponds to a host target binding site such as BINDING SITE 1, BINDING SITE II or BINDING SITE III of FIG. 1, thereby inhibiting translation of VGAM106 host target RNA, herein schematically represented by VGAM3 HOST TARGET RNA into VGAM106 host target protein, herein schematically represented by VGAM3 HOST TARGET PROTEIN, both of FIG. 1.

[5251] VGAM107 RNA, herein schematically represented by VGAM4 binds complimentarily to a host target binding site located in an untranslated region of VGAM107 host target RNA, herein schematically represented by VGAM4 HOST TARGET RNA, which host target binding site corresponds to a host target binding site such as BINDING SITE 1, BINDING SITE II or BINDING SITE III of FIG. 1, thereby inhibiting translation of VGAM107 host target RNA, herein schematically represented by VGAM4 HOST TARGET RNA into VGAM107 host target protein, herein schematically represented by VGAM4 HOST TARGET PROTEIN, both of FIG. 1.

[5252] VGAM108 RNA, herein schematically represented by VGAM5 binds complimentarily to a host target binding site located in an untranslated region of VGAM108 host target RNA, herein schematically represented by VGAM5 HOST TARGET RNA, which host target binding site corresponds to a host target binding site such as BINDING SITE I, BINDING SITE II or BINDING SITE III of FIG. 1, thereby inhibiting translation of VGAM108 host target RNA, herein schematically represented by VGAM5 HOST TARGET RNA into VGAM108 host target protein, herein schematically represented by VGAM5 HOST TARGET PROTEIN, both of FIG. 1.

[5253] it is appreciated that a function of VGR380 gene, herein designated VGR GENE, is inhibition of expression of host target genes, as part of a novel viral mechanism of attacking a host. Accordingly, utilities of VGR380 gene include diagnosis, prevention and treatment of viral infection by. Specific functions, and accordingly utilities, of VGR380 gene, herein designated VGR GENE, correlate with, and may be deduced from, the identity of the host target genes, which are inhibited by VGAM RNAs comprised in the operon-like cluster of VGR380 gene: VGAM104 host target protein, VGAM105 host target protein, VGAM106 host target protein, VGAM107 host target protein and VGAM108 host target protein, herein schematically represented by VGAM1 HOST TARGET PROTEIN through VGAM HOST TARGET PROTEIN respectively. The function of these host target genes is elaborated hereinabove with reference to VGAM104, VGAM105, VGAM106, VGAM107 and VGAM108

[5254] FIG. 9 further provides a conceptual description of novel bioinformatically detected regulatory viral gene, referred to here as Viral Genomic Record 381(VGR381) viral gene, which encodes an operon-like cluster of novel viral micro RNA-like genes, each of which in turn modulates expression of at least one host target gene, the function and utility of which at least one host target gene is known in the art.

[5255] VGR381 gene, herein designated VGR GENE, is a novel bioinformatically detected regulatory, non protein coding, RNA viral gene. The method by which VGR381 gene was detected is described hereinabove with reference to FIGS. 6-15.

[5256] VGR381 gene encodes VGR381 precursor RNA, herein designated VGR PRECURSOR RNA, an RNA molecule, typically several hundred nucleotides long.

[5257] VGR381 precursor RNA folds spatially, forming VGR381 folded precursor RNA, herein designated VGR FOLDED PRECURSOR RNA. It is appreciated that VGR381 folded precursor RNA, herein designated VGR FOLDED PRECURSOR RNA, comprises a plurality of what is known in the art as hairpin structures. These hairpin structures are due to the fact that the nucleotide sequence of VGR381 precursor RNA comprises a plurality of segments, the first half of each such segment having a nucleotide sequence which is at least a partial inversed-reversed sequence of the second half thereof, as is well known in the art.

[5258] VGR381 folded precursor RNA, herein designated VGR FOLDED PRECURSOR RNA, is naturally processed by cellular enzymatic activity into at least 8 separate VGAM precursor RNAs, VGAM110 precursor RNA, VGAM111 precursor RNA, VGAM112 precursor RNA, VGAM113 precursor RNA, VGAM114 precursor RNA, VGAM115 precursor RNA, VGAM116 precursor RNA and VGAM117 precursor RNA, herein schematically represented by VGAM1 PRECURSOR, VGAM2 PRECURSOR, VGAM3 PRECURSOR, VGAM4 PRECURSOR, VGAM5 PRECURSOR, VGAM6 PRECURSOR, VGAM7 PRECURSOR and VGAM8 PRECURSOR respectively, each of which VGAM precursor RNAs being a hairpin shaped RNA segment, corresponding to VGAM PRECURSOR RNA of FIG. 8.

[5259] The above mentioned VGAM precursor RNAs are diced by DICER COMPLEX of FIG. 8, yielding respective short RNA segments of about 22 nucleotides in length, VGAM110 RNA, VGAM111 RNA, VGAM112 RNA, VGAM113 RNA, VGAM114 RNA, VGAM115 RNA, VGAM116 RNA and VGAM117 RNA respectively, herein schematically represented by VGAM1 RNA, VGAM2 RNA, VGAM3 RNA, VGAM4 RNA, VGAM5 RNA, VGAM6 RNA, VGAM7 RNA and VGAM8 RNA respectively, each of which VGAM RNAs corresponding to VGAM RNA of FIG. 8.

[5260] VGAM110 RNA, herein schematically represented by VGAM1 binds complimentarily to a host target binding site located in an untranslated region of VGAM110 host target RNA, herein schematically represented by VGAM1 HOST TARGET RNA, which host target binding site corresponds to a host target binding site such as BINDING SITE I, BINDING SITE II or BINDING SITE III of FIG. 1, thereby inhibiting translation of VGAM110 host target RNA, herein schematically represented by VGAM1 HOST TARGET RNA into VGAM110 host target protein, herein schematically represented by VGAM1 HOST TARGET PROTEIN, both of FIG. 1.

[5261] VGAM111 RNA, herein schematically represented by VGAM2 binds complimentarily to a host target binding site located in an untranslated region of VGAM111 host target RNA, herein schematically represented by VGAM2 HOST TARGET RNA, which host target binding site corresponds to a host target binding site such as BINDING SITE I, BINDING SITE II or BINDING SITE III of FIG. 1, thereby inhibiting translation of VGAM111 host target RNA, herein schematically represented by VGAM2 HOST TARGET RNA into VGAM111 host target protein, herein schematically represented by VGAM2 HOST TARGET PROTEIN, both of FIG. 1.

[5262] VGAM112 RNA, herein schematically represented by VGAM3 binds complimentarily to a host target binding site located in an untranslated region of VGAM112 host target RNA, herein schematically represented by VGAM3 HOST TARGET RNA, which host target binding site corresponds to a host target binding site such as BINDING SITE I, BINDING SITE II or BINDING SITE III of FIG. 1, thereby inhibiting translation of VGAM112 host target RNA, herein schematically represented by VGAM3 HOST TARGET RNA into VGAM112 host target protein, herein schematically represented by VGAM3 HOST TARGET PROTEIN, both of FIG. 1.

[5263] VGAM113 RNA, herein schematically represented by VGAM4 binds complimentarily to a host target binding site located in an untranslated region of VGAM113 host target RNA, herein schematically represented by VGAM4 HOST TARGET RNA, which host target binding site corresponds to a host target binding site such as BINDING SITE I, BINDING SITE II or BINDING SITE III of FIG. 1, thereby inhibiting translation of VGAM113 host target RNA, herein schematically represented by VGAM4 HOST TARGET RNA into VGAM113 host target protein, herein schematically represented by VGAM4 HOST TARGET PROTEIN, both of FIG. 1.

[5264] VGAM114 RNA, herein schematically represented by VGAM5 binds complimentarily to a host target binding site located in an untranslated region of VGAM114 host target RNA, herein schematically represented by VGAM5 HOST TARGET RNA, which host target binding site corresponds to a host target binding site such as BINDING SITE I, BINDING SITE II or BINDING SITE III of FIG. 1, thereby inhibiting translation of VGAM114 host target RNA, herein schematically represented by VGAM5 HOST TARGET RNA into VGAM114 host target protein, herein schematically represented by VGAM5 HOST TARGET PROTEIN, both of FIG. 1.

[5265] VGAM115 RNA, herein schematically represented by VGAM6 binds complimentarily to a host target binding site located in an untranslated region of VGAM115 host target RNA, herein schematically represented by VGAM6 HOST TARGET RNA, which host target binding site corresponds to a host target binding site such as BINDING SITE I, BINDING SITE II or BINDING SITE III of FIG. 1, thereby inhibiting translation of VGAM115 host target RNA, herein schematically represented by VGAM6 HOST TARGET RNA into VGAM115 host target protein, herein schematically represented by VGAM6 HOST TARGET PROTEIN, both of FIG. 1.

[5266] VGAM116 RNA, herein schematically represented by VGAM7 binds complimentarily to a host target binding site located in an untranslated region of VGAM116 host target RNA, herein schematically represented by VGAM7 HOST TARGET RNA, which host target binding site corresponds to a host target binding site such as BINDING SITE I, BINDING SITE II or BINDING SITE III of FIG. 1, thereby inhibiting translation of VGAM116 host target RNA, herein schematically represented by VGAM7 HOST TARGET RNA into VGAM116 host target protein, herein schematically represented by VGAM7 HOST TARGET PROTEIN, both of FIG. 1.

[5267] VGAM117 RNA, herein schematically represented by VGAM8 binds complimentarily to a host target binding site located in an untranslated region of VGAM117 host target RNA, herein schematically represented by VGAM8 HOST TARGET RNA, which host target binding site corresponds to a host target binding site such as BINDING SITE I, BINDING SITE II or BINDING SITE III of FIG. 1, thereby inhibiting translation of VGAM117 host target RNA, herein schematically represented by VGAM8 HOST TARGET RNA into VGAM117 host target protein, herein schematically represented by VGAM8 HOST TARGET PROTEIN, both of FIG. 1.

[5268] It is appreciated that a function of VGR381 gene, herein designated VGR GENE, is inhibition of expression of host target genes, as part of a novel viral mechanism of attacking a host. Accordingly, utilities of VGR381 gene include diagnosis, prevention and treatment of viral infection by. Specific functions, and accordingly utilities, of VGR381 gene, herein designated VGR GENE, correlate with, and may be deduced from, the identity of the host target genes, which are inhibited by VGAM RNAs comprised in the operon-like cluster of VGR381 gene: VGAM110 host target protein, VGAM111 host target protein, VGAM112 host target protein, VGAM113 host target protein, VGAM114 host target protein, VGAM115 host target protein, VGAM116 host target protein and VGAM117 host target protein, herein schematically represented by VGAM1 HOST TARGET PROTEIN through VGAM HOST TARGET PROTEIN respectively. The function of these host target genes is elaborated hereinabove with reference to VGAM110, VGAM111, VGAM112, VGAM113, VGAM114, VGAM115, VGAM116 and VGAM117

[5269] FIG. 9 further provides a conceptual description of novel bioinformatically detected regulatory viral gene, referred to here as Viral Genomic Record 382(VGR382) viral gene, which encodes an operon-like cluster of novel viral micro RNA-like genes, each of which in turn modulates expression of at least one host target gene, the function and utility of which at least one host target gene is known in the art.

[5270] VGR382 gene, herein designated VGR GENE, is a novel bioinformatically detected regulatory, non protein coding, RNA viral gene. The method by which VGR382 gene was detected is described hereinabove with reference to FIGS. 6-15.

[5271] VGR382 gene encodes VGR382 precursor RNA, herein designated VGR PRECURSOR RNA, an RNA molecule, typically several hundred nucleotides long.

[5272] VGR382 precursor RNA folds spatially, forming VGR382 folded precursor RNA, herein designated VGR FOLDED PRECURSOR RNA. It is appreciated that VGR382 folded precursor RNA, herein designated VGR FOLDED PRECURSOR RNA, comprises a plurality of what is known in the art as hairpin structures. These hairpin structures are due to the fact that the nucleotide sequence of VGR382 precursor RNA comprises a plurality of segments, the first half of each such segment having a nucleotide sequence which is at least a partial inversed-reversed sequence of the second half thereof, as is well known in the art.

[5273] VGR382 folded precursor RNA, herein designated VGR FOLDED PRECURSOR RNA, is naturally processed by cellular enzymatic activity into at least 4 separate VGAM precursor RNAs, VGAM118 precursor RNA, VGAM119 precursor RNA, VGAM120 precursor RNA and VGAM121 precursor RNA, herein schematically represented by VGAM1 PRECURSOR, VGAM2 PRECURSOR, VGAM3 PRECURSOR and VGAM4 PRECURSOR respectively, each of which VGAM precursor RNAs being a hairpin shaped RNA segment, corresponding to VGAM PRECURSOR RNA of FIG. 8.

[5274] The above mentioned VGAM precursor RNAs are diced by DICER COMPLEX of FIG. 8, yielding respective short RNA segments of about 22 nucleotides in length, VGAM118 RNA, VGAM119 RNA, VGAM120 RNA and VGAM121 RNA respectively, herein schematically represented by VGAM1 RNA, VGAM2 RNA, VGAM3 RNA and VGAM4 RNA respectively, each of which VGAM RNAs corresponding to VGAM RNA of FIG. 8.

[5275] VGAM118 RNA, herein schematically represented by VGAM1 binds complimentarily to a host target binding site located in an untranslated region of VGAM118 host target RNA, herein schematically represented by VGAM1 HOST TARGET RNA, which host target binding site corresponds to a host target binding site such as BINDING SITE I, BINDING SITE II or BINDING SITE III of FIG. 1, thereby inhibiting translation of VGAM118 host target RNA, herein schematically represented by VGAM1 HOST TARGET RNA into VGAM118 host target protein, herein schematically represented by VGAM1 HOST TARGET PROTEIN, both of FIG. 1.

[5276] VGAM119 RNA, herein schematically represented by VGAM2 binds complimentarily to a host target binding site located in an untranslated region of VGAM119 host target RNA, herein schematically represented by VGAM2 HOST TARGET RNA, which host target binding site corresponds to a host target binding site such as BINDING SITE I, BINDING SITE II or BINDING SITE III of FIG. 1, thereby inhibiting translation of VGAM119 host target RNA, herein schematically represented by VGAM2 HOST TARGET RNA into VGAM119 host target protein, herein schematically represented by VGAM2 HOST TARGET PROTEIN, both of FIG. 1.

[5277] VGAM120 RNA, herein schematically represented by VGAM3 binds complimentarily to a host target binding site located in an untranslated region of VGAM120 host target RNA, herein schematically represented by VGAM3 HOST TARGET RNA, which host target binding site corresponds to a host target binding site such as BINDING SITE I, BINDING SITE II or BINDING SITE III of FIG. 1, thereby inhibiting translation of VGAM120 host target RNA, herein schematically represented by VGAM3 HOST TARGET RNA into VGAM120 host target protein, herein schematically represented by VGAM3 HOST TARGET PROTEIN, both of FIG. 1.

[5278] VGAM121 RNA, herein schematically represented by VGAM4 binds complimentarily to a host target binding site located in an untranslated region of VGAM121 host target RNA, herein schematically represented by VGAM4 HOST TARGET RNA, which host target binding site corresponds to a host target binding site such as BINDING SITE I, BINDING SITE II or BINDING SITE III of FIG. 1, thereby inhibiting translation of VGAM121 host target RNA, herein schematically represented by VGAM4 HOST TARGET RNA into VGAM121 host target protein, herein schematically represented by VGAM4 HOST TARGET PROTEIN, both of FIG. 1.

[5279] It is appreciated that a function of VGR382 gene, herein designated VGR GENE, is inhibition of expression of host target genes, as part of a novel viral mechanism of attacking a host. Accordingly, utilities of VGR382 gene include diagnosis, prevention and treatment of viral infection by. Specific functions, and accordingly utilities, of VGR382 gene, herein designated VGR GENE, correlate with, and may be deduced from, the identity of the host target genes, which are inhibited by VGAM RNAs comprised in the operon-like cluster of VGR382 gene: VGAM118 host target protein, VGAM119 host target protein, VGAM120 host target protein and VGAM121 host target protein, herein schematically represented by VGAM1 HOST TARGET PROTEIN through VGAM HOST TARGET PROTEIN respectively. The function of these host target genes is elaborated hereinabove with reference to VGAM118, VGAM119, VGAM120 and VGAM121

[5280] FIG. 9 further provides a conceptual description of novel bioinformatically detected regulatory viral gene, referred to here as Viral Genomic Record 383(VGR383) viral gene, which encodes an operon-like cluster of novel viral micro RNA-like genes, each of which in turn modulates expression of at least one host target gene, the function and utility of which at least one host target gene is known in the art.

[5281] VGR383 gene, herein designated VGR GENE, is a novel bioinformatically detected regulatory, non protein coding, RNA viral gene. The method by which VGR383 gene was detected is described hereinabove with reference to FIGS. 6-15.

[5282] VGR383 gene encodes VGR383 precursor RNA, herein designated VGR PRECURSOR RNA, an RNA molecule, typically several hundred nucleotides long.

[5283] VGR383 precursor RNA folds spatially, forming VGR383 folded precursor RNA, herein designated VGR FOLDED PRECURSOR RNA. It is appreciated that VGR383 folded precursor RNA, herein designated VGR FOLDED PRECURSOR RNA, comprises a plurality of what is known in the art as hairpin structures. These hairpin structures are due to the fact that the nucleotide sequence of VGR383 precursor RNA comprises a plurality of segments, the first half of each such segment having a nucleotide sequence which is at least a partial inversed-reversed sequence of the second half thereof, as is well known in the art.

[5284] VGR383 folded precursor RNA, herein designated VGR FOLDED PRECURSOR RNA, is naturally processed by cellular enzymatic activity into at least 2 separate VGAM precursor RNAs, VGAM123 precursor RNA and VGAM124 precursor RNA, herein schematically represented by VGAM1 PRECURSOR and VGAM2 PRECURSOR respectively, each of which VGAM precursor RNAs being a hairpin shaped RNA segment, corresponding to VGAM PRECURSOR RNA of FIG. 8.

[5285] The above mentioned VGAM precursor RNAs are diced by DICER COMPLEX of FIG. 8, yielding respective short RNA segments of about 22 nucleotides in length, VGAM123 RNA and VGAM124 RNA respectively, herein schematically represented by VGAM1 RNA and VGAM2 RNA respectively, each of which VGAM RNAs corresponding to VGAM RNA of FIG. 8.

[5286] VGAM123 RNA, herein schematically represented by VGAM1 binds complimentarily to a host target binding site located in an untranslated region of VGAM123 host target RNA, herein schematically represented by VGAM1 HOST TARGET RNA, which host target binding site corresponds to a host target binding site such as BINDING SITE I, BINDING SITE II or BINDING SITE III of FIG. 1, thereby inhibiting translation of VGAM123 host target RNA, herein schematically represented by VGAM1 HOST TARGET RNA into VGAM123 host target protein, herein schematically represented by VGAM1 HOST TARGET PROTEIN, both of FIG. 1.

[5287] VGAM124 RNA, herein schematically represented by VGAM2 binds complimentarily to a host target binding site located in an untranslated region of VGAM124 host target RNA, herein schematically represented by VGAM2 HOST TARGET RNA, which host target binding site corresponds to a host target binding site such as BINDING SITE 1, BINDING SITE II or BINDING SITE III of FIG. 1, thereby inhibiting translation of VGAM124 host target RNA, herein schematically represented by VGAM2 HOST TARGET RNA into VGAM124 host target protein, herein schematically represented by VGAM2 HOST TARGET PROTEIN, both of FIG. 1.

[5288] It is appreciated that a function of VGR383 gene, herein designated VGR GENE, is inhibition of expression of host target genes, as part of a novel viral mechanism of attacking a host. Accordingly, utilities of VGR383 gene include diagnosis, prevention and treatment of viral infection by. Specific functions, and accordingly utilities, of VGR383 gene, herein designated VGR GENE, correlate with, and may be deduced from, the identity of the host target genes, which are inhibited by VGAM RNAs comprised in the operon-like cluster of VGR383 gene: VGAM123 host target protein and VGAM124 host target protein, herein schematically represented by VGAM1 HOST TARGET PROTEIN and VGAM HOST TARGET PROTEIN respectively. The function of these host target genes is elaborated hereinabove with reference to VGAM123 and VGAM124

[5289] FIG. 9 further provides a conceptual description of novel bioinformatically detected regulatory viral gene, referred to here as Viral Genomic Record 384(VGR384) viral gene, which encodes an operon-like cluster of novel viral micro RNA-like genes, each of which in turn modulates expression of at least one host target gene, the function and utility of which at least one host target gene is known in the art.

[5290] VGR384 gene, herein designated VGR GENE, is a novel bioinformatically detected regulatory, non protein coding, RNA viral gene. The method by which VGR384 gene was detected is described hereinabove with reference to FIGS. 6-15.

[5291] VGR384 gene encodes VGR384 precursor RNA, herein designated VGR PRECURSOR RNA, an RNA molecule, typically several hundred nucleotides long.

[5292] VGR384 precursor RNA folds spatially, forming VGR384 folded precursor RNA, herein designated VGR FOLDED PRECURSOR RNA. It is appreciated that VGR384 folded precursor RNA, herein designated VGR FOLDED PRECURSOR RNA, comprises a plurality of what is known in the art as hairpin structures. These hairpin structures are due to the fact that the nucleotide sequence of VGR384 precursor RNA comprises a plurality of segments, the first half of each such segment having a nucleotide sequence which is at least a partial inversed-reversed sequence of the second half thereof, as is well known in the art.

[5293] VGR384 folded precursor RNA, herein designated VGR FOLDED PRECURSOR RNA, is naturally processed by cellular enzymatic activity into at least 2 separate VGAM precursor RNAs, VGAM125 precursor RNA and VGAM126 precursor RNA, herein schematically represented by VGAM1 PRECURSOR and VGAM2 PRECURSOR respectively, each of which VGAM precursor RNAs being a hairpin shaped RNA segment, corresponding to VGAM PRECURSOR RNA of FIG. 8.

[5294] The above mentioned VGAM precursor RNAs are diced by DICER COMPLEX of FIG. 8, yielding respective short RNA segments of about 22 nucleotides in length, VGAM125 RNA and VGAM126 RNA respectively, herein schematically represented by VGAM1 RNA and VGAM2 RNA respectively, each of which VGAM RNAs corresponding to VGAM RNA of FIG. 8.

[5295] VGAM125 RNA, herein schematically represented by VGAM1 binds complimentarily to a host target binding site located in an untranslated region of VGAM125 host target RNA, herein schematically represented by VGAM1 HOST TARGET RNA, which host target binding site corresponds to a host target binding site such as BINDING SITE I, BINDING SITE II or BINDING SITE III of FIG. 1, thereby inhibiting translation of VGAM125 host target RNA, herein schematically represented by VGAM1 HOST TARGET RNA into VGAM125 host target protein, herein schematically represented by VGAM1 HOST TARGET PROTEIN, both of FIG. 1.

[5296] VGAM126 RNA, herein schematically represented by VGAM2 binds complimentarily to a host target binding site located in an untranslated region of VGAM126 host target RNA, herein schematically represented by VGAM2 HOST TARGET RNA, which host target binding site corresponds to a host target binding site such as BINDING SITE I, BINDING SITE II or BINDING SITE III of FIG. 1, thereby inhibiting translation of VGAM126 host target RNA, herein schematically represented by VGAM2 HOST TARGET RNA into VGAM126 host target protein, herein schematically represented by VGAM2 HOST TARGET PROTEIN, both of FIG. 1.

[5297] It is appreciated that a function of VGR384 gene, herein designated VGR GENE, is inhibition of expression of host target genes, as part of a novel viral mechanism of attacking a host. Accordingly, utilities of VGR384 gene include diagnosis, prevention and treatment of viral infection by. Specific functions, and accordingly utilities, of VGR384 gene, herein designated VGR GENE, correlate with, and may be deduced from, the identity of the host target genes, which are inhibited by VGAM RNAs comprised in the operon-like cluster of VGR384 gene: VGAM125 host target protein and VGAM126 host target protein, herein schematically represented by VGAM1 HOST TARGET PROTEIN and VGAM HOST TARGET PROTEIN respectively. The function of these host target genes is elaborated hereinabove with reference to VGAM125 and VGAM126

[5298] FIG. 9 further provides a conceptual description of novel bioinformatically detected regulatory viral gene, referred to here as Viral Genomic Record 385(VGR385) viral gene, which encodes an operon-like cluster of novel viral micro RNA-like genes, each of which in turn modulates expression of at least one host target gene, the function and utility of which at least one host target gene is known in the art.

[5299] VGR385 gene, herein designated VGR GENE, is a novel bioinformatically detected regulatory, non protein coding, RNA viral gene. The method by which VGR385 gene was detected is described hereinabove with reference to FIGS. 6-15.

[5300] VGR385 gene encodes VGR385 precursor RNA, herein designated VGR PRECURSOR RNA, an RNA molecule, typically several hundred nucleotides long.

[5301] VGR385 precursor RNA folds spatially, forming VGR385 folded precursor RNA, herein designated VGR FOLDED PRECURSOR RNA. It is appreciated that VGR385 folded precursor RNA, herein designated VGR FOLDED PRECURSOR RNA, comprises a plurality of what is known in the art as hairpin structures. These hairpin structures are due to the fact that the nucleotide sequence of VGR385 precursor RNA comprises a plurality of segments, the first half of each such segment having a nucleotide sequence which is at least a partial inversed-reversed sequence of the second half thereof, as is well known in the art.

[5302] VGR385 folded precursor RNA, herein designated VGR FOLDED PRECURSOR RNA, is naturally processed by cellular enzymatic activity into at least 2 separate VGAM precursor RNAs, VGAM127 precursor RNA and VGAM128 precursor RNA, herein schematically represented by VGAM1 PRECURSOR and VGAM2 PRECURSOR respectively, each of which VGAM precursor RNAs being a hairpin shaped RNA segment, corresponding to VGAM PRECURSOR RNA of FIG. 8.

[5303] The above mentioned VGAM precursor RNAs are diced by DICER COMPLEX of FIG. 8, yielding respective short RNA segments of about 22 nucleotides in length, VGAM127 RNA and VGAM128 RNA respectively, herein schematically represented by VGAM1 RNA and VGAM2 RNA respectively, each of which VGAM RNAs corresponding to VGAM RNA of FIG. 8.

[5304] VGAM127 RNA, herein schematically represented by VGAM1 binds complimentarily to a host target binding site located in an untranslated region of VGAM127 host target RNA, herein schematically represented by VGAM1 HOST TARGET RNA, which host target binding site corresponds to a host target binding site such as BINDING SITE I, BINDING SITE II or BINDING SITE III of FIG. 1, thereby inhibiting translation of VGAM127 host target RNA, herein schematically represented by VGAM1 HOST TARGET RNA into VGAM127 host target protein, herein schematically represented by VGAM1 HOST TARGET PROTEIN, both of FIG. 1.

[5305] VGAM128 RNA, herein schematically represented by VGAM2 binds complimentarily to a host target binding site located in an untranslated region of VGAM128 host target RNA, herein schematically represented by VGAM2 HOST TARGET RNA, which host target binding site corresponds to a host target binding site such as BINDING SITE I, BINDING SITE II or BINDING SITE III of FIG. 1, thereby inhibiting translation of VGAM128 host target RNA, herein schematically represented by VGAM2 HOST TARGET RNA into VGAM128 host target protein, herein schematically represented by VGAM2 HOST TARGET PROTEIN, both of FIG. 1.

[5306] It is appreciated that a function of VGR385 gene, herein designated VGR GENE, is inhibition of expression of host target genes, as part of a novel viral mechanism of attacking a host. Accordingly, utilities of VGR385 gene include diagnosis, prevention and treatment of viral infection by. Specific functions, and accordingly utilities, of VGR385 gene, herein designated VGR GENE, correlate with, and may be deduced from, the identity of the host target genes, which are inhibited by VGAM RNAs comprised in the operon-like cluster of VGR385 gene: VGAM127 host target protein and VGAM128 host target protein, herein schematically represented by VGAM1 HOST TARGET PROTEIN and VGAM HOST TARGET PROTEIN respectively. The function of these host target genes is elaborated hereinabove with reference to VGAM127 and VGAM128

[5307] FIG. 9 further provides a conceptual description of novel bioinformatically detected regulatory viral gene, referred to here as Viral Genomic Record 386(VGR386) viral gene, which encodes an operon-like cluster of novel viral micro RNA-like genes, each of which in turn modulates expression of at least one host target gene, the function and utility of which at least one host target gene is known in the art.

[5308] VGR386 gene, herein designated VGR GENE, is a novel bioinformatically detected regulatory, non protein coding, RNA viral gene. The method by which VGR386 gene was detected is described hereinabove with reference to FIGS. 6-15.

[5309] VGR386 gene encodes VGR386 precursor RNA, herein designated VGR PRECURSOR RNA, an RNA molecule, typically several hundred nucleotides long.

[5310] VGR386 precursor RNA folds spatially, forming VGR386 folded precursor RNA, herein designated VGR FOLDED PRECURSOR RNA. It is appreciated that VGR386 folded precursor RNA, herein designated VGR FOLDED PRECURSOR RNA, comprises a plurality of what is known in the art as hairpin structures. These hairpin structures are due to the fact that the nucleotide sequence of VGR386 precursor RNA comprises a plurality of segments, the first half of each such segment having a nucleotide sequence which is at least a partial inversed-reversed sequence of the second half thereof, as is well known in the art.

[5311] VGR386 folded precursor RNA, herein designated VGR FOLDED PRECURSOR RNA, is naturally processed by cellular enzymatic activity into at least 3 separate VGAM precursor RNAs, VGAM130 precursor RNA, VGAM131 precursor RNA and VGAM132 precursor RNA, herein schematically represented by VGAM1 PRECURSOR, VGAM2 PRECURSOR and VGAM3 PRECURSOR respectively, each of which VGAM precursor RNAs being a hairpin shaped RNA segment, corresponding to VGAM PRECURSOR RNA of FIG. 8.

[5312] The above mentioned VGAM precursor RNAs are diced by DICER COMPLEX of FIG. 8, yielding respective short RNA segments of about 22 nucleotides in length, VGAM130 RNA, VGAM131 RNA and VGAM132 RNA respectively, herein schematically represented by VGAM1 RNA, VGAM2 RNA and VGAM3 RNA respectively, each of which VGAM RNAs corresponding to VGAM RNA of FIG. 8.

[5313] VGAM130 RNA, herein schematically represented by VGAM1 binds complimentarily to a host target binding site located in an untranslated region of VGAM130 host target RNA, herein schematically represented by VGAM1 HOST TARGET RNA, which host target binding site corresponds to a host target binding site such as BINDING SITE I, BINDING SITE II or BINDING SITE III of FIG. 1, thereby inhibiting translation of VGAM130 host target RNA, herein schematically represented by VGAM1 HOST TARGET RNA into VGAM130 host target protein, herein schematically represented by VGAM1 HOST TARGET PROTEIN, both of FIG. 1.

[5314] VGAM131 RNA, herein schematically represented by VGAM2 binds complimentarily to a host target binding site located in an untranslated region of VGAM131 host target RNA, herein schematically represented by VGAM2 HOST TARGET RNA, which host target binding site corresponds to a host target binding site such as BINDING SITE I, BINDING SITE II or BINDING SITE III of FIG. 1, thereby inhibiting translation of VGAM131 host target RNA, herein schematically represented by VGAM2 HOST TARGET RNA into VGAM131 host target protein, herein schematically represented by VGAM2 HOST TARGET PROTEIN, both of FIG. 1.

[5315] VGAM132 RNA, herein schematically represented by VGAM3 binds complimentarily to a host target binding site located in an untranslated region of VGAM132 host target RNA, herein schematically represented by VGAM3 HOST TARGET RNA, which host target binding site corresponds to a host target binding site such as BINDING SITE I, BINDING SITE II or BINDING SITE III of FIG. 1, thereby inhibiting translation of VGAM132 host target RNA, herein schematically represented by VGAM3 HOST TARGET RNA into VGAM132 host target protein, herein schematically represented by VGAM3 HOST TARGET PROTEIN, both of FIG. 1.

[5316] It is appreciated that a function of VGR386 gene, herein designated VGR GENE, is inhibition of expression of host target genes, as part of a novel viral mechanism of attacking a host. Accordingly, utilities of VGR386 gene include diagnosis, prevention and treatment of viral infection by. Specific functions, and accordingly utilities, of VGR386 gene, herein designated VGR GENE, correlate with, and may be deduced from, the identity of the host target genes, which are inhibited by VGAM RNAs comprised in the operon-like cluster of VGR386 gene: VGAM130 host target protein, VGAM131 host target protein and VGAM132 host target protein, herein schematically represented by VGAM1 HOST TARGET PROTEIN through VGAM HOST TARGET PROTEIN respectively. The function of these host target genes is elaborated hereinabove with reference to VGAM130, VGAM131 and VGAM132

[5317] FIG. 9 further provides a conceptual description of novel bioinformatically detected regulatory viral gene, referred to here as Viral Genomic Record 387(VGR387) viral gene, which encodes an operon-like cluster of novel viral micro RNA-like genes, each of which in turn modulates expression of at least one host target gene, the function and utility of which at least one host target gene is known in the art.

[5318] VGR387 gene, herein designated VGR GENE, is a novel bioinformatically detected regulatory, non protein coding, RNA viral gene. The method by which VGR387 gene was detected is described hereinabove with reference to FIGS. 6-15.

[5319] VGR387 gene encodes VGR387 precursor RNA, herein designated VGR PRECURSOR RNA, an RNA molecule, typically several hundred nucleotides long.

[5320] VGR387 precursor RNA folds spatially, forming VGR387 folded precursor RNA, herein designated VGR FOLDED PRECURSOR RNA. It is appreciated that VGR387 folded precursor RNA, herein designated VGR FOLDED PRECURSOR RNA, comprises a plurality of what is known in the art as hairpin structures. These hairpin structures are due to the fact that the nucleotide sequence of VGR387 precursor RNA comprises a plurality of segments, the first half of each such segment having a nucleotide sequence which is at least a partial inversed-reversed sequence of the second half thereof, as is well known in the art.

[5321] VGR387 folded precursor RNA, herein designated VGR FOLDED PRECURSOR RNA, is naturally processed by cellular enzymatic activity into at least 7 separate VGAM precursor RNAs, VGAM133 precursor RNA, VGAM134 precursor RNA, VGAM135 precursor RNA, VGAM136 precursor RNA, VGAM137 precursor RNA, VGAM138 precursor RNA and VGAM139 precursor RNA, herein schematically represented by VGAM1 PRECURSOR, VGAM2 PRECURSOR, VGAM3 PRECURSOR, VGAM4 PRECURSOR, VGAM5 PRECURSOR, VGAM6 PRECURSOR and VGAM7 PRECURSOR respectively, each of which VGAM precursor RNAs being a hairpin shaped RNA segment, corresponding to VGAM PRECURSOR RNA of FIG. 8.

[5322] The above mentioned VGAM precursor RNAs are diced by DICER COMPLEX of FIG. 8, yielding respective short RNA segments of about 22 nucleotides in length, VGAM133 RNA, VGAM134 RNA, VGAM135 RNA, VGAM136 RNA, VGAM137 RNA, VGAM138 RNA and VGAM139 RNA respectively, herein schematically represented by VGAM1 RNA, VGAM2 RNA, VGAM3 RNA, VGAM4 RNA, VGAM5 RNA, VGAM6 RNA and VGAM7 RNA respectively, each of which VGAM RNAs corresponding to VGAM RNA of FIG. 8.

[5323] VGAM133 RNA, herein schematically represented by VGAM1 binds complimentarily to a host target binding site located in an untranslated region of VGAM133 host target RNA, herein schematically represented by VGAM1 HOST TARGET RNA, which host target binding site corresponds to a host target binding site such as BINDING SITE 1, BINDING SITE II or BINDING SITE III of FIG. 1, thereby inhibiting translation of VGAM133 host target RNA, herein schematically represented by VGAM1 HOST TARGET RNA into VGAM133 host target protein, herein schematically represented by VGAM1 HOST TARGET PROTEIN, both of FIG. 1.

[5324] VGAM134 RNA, herein schematically represented by VGAM2 binds complimentarily to a host target binding site located in an untranslated region of VGAM134 host target RNA, herein schematically represented by VGAM2 HOST TARGET RNA, which host target binding site corresponds to a host target binding site such as BINDING SITE I, BINDING SITE II or BINDING SITE III of FIG. 1, thereby inhibiting translation of VGAM134 host target RNA, herein schematically represented by VGAM2 HOST TARGET RNA into VGAM134 host target protein, herein schematically represented by VGAM2 HOST TARGET PROTEIN, both of FIG. 1.

[5325] VGAM135 RNA, herein schematically represented by VGAM3 binds complimentarily to a host target binding site located in an untranslated region of VGAM135 host target RNA, herein schematically represented by VGAM3 HOST TARGET RNA, which host target binding site corresponds to a host target binding site such as BINDING SITE I, BINDING SITE II or BINDING SITE III of FIG. 1, thereby inhibiting translation of VGAM135 host target RNA, herein schematically represented by VGAM3 HOST TARGET RNA into VGAM135 host target protein, herein schematically represented by VGAM3 HOST TARGET PROTEIN, both of FIG. 1.

[5326] VGAM136 RNA, herein schematically represented by VGAM4 binds complimentarily to a host target binding site located in an untranslated region of VGAM136 host target RNA, herein schematically represented by VGAM4 HOST TARGET RNA, which host target binding site corresponds to a host target binding site such as BINDING SITE 1, BINDING SITE II or BINDING SITE III of FIG. 1, thereby inhibiting translation of VGAM136 host target RNA, herein schematically represented by VGAM4 HOST TARGET RNA into VGAM136 host target protein, herein schematically represented by VGAM4 HOST TARGET PROTEIN, both of FIG. 1.

[5327] VGAM137 RNA, herein schematically represented by VGAM5 binds complimentarily to a host target binding site located in an untranslated region of VGAM137 host target RNA, herein schematically represented by VGAM5 HOST TARGET RNA, which host target binding site corresponds to a host target binding site such as BINDING SITE 1, BINDING SITE II or BINDING SITE III of FIG. 1, thereby inhibiting translation of VGAM137 host target RNA, herein schematically represented by VGAM5 HOST TARGET RNA into VGAM137 host target protein, herein schematically represented by VGAM5 HOST TARGET PROTEIN, both of FIG. 1.

[5328] VGAM138 RNA, herein schematically represented by VGAM6 binds complimentarily to a host target binding site located in an untranslated region of VGAM138 host target RNA, herein schematically represented by VGAM6 HOST TARGET RNA, which host target binding site corresponds to a host target binding site such as BINDING SITE 1, BINDING SITE II or BINDING SITE III of FIG. 1, thereby inhibiting translation of VGAM138 host target RNA, herein schematically represented by VGAM6 HOST TARGET RNA into VGAM138 host target protein, herein schematically represented by VGAM6 HOST TARGET PROTEIN, both of FIG. 1.

[5329] VGAM139 RNA, herein schematically represented by VGAM7 binds complimentarily to a host target binding site located in an untranslated region of VGAM139 host target RNA, herein schematically represented by VGAM7 HOST TARGET RNA, which host target binding site corresponds to a host target binding site such as BINDING SITE 1, BINDING SITE II or BINDING SITE III of FIG. 1, thereby inhibiting translation of VGAM139 host target RNA, herein schematically represented by VGAM7 HOST TARGET RNA into VGAM139 host target protein, herein schematically represented by VGAM7 HOST TARGET PROTEIN, both of FIG. 1.

[5330] It is appreciated that a function of VGR387 gene, herein designated VGR GENE, is inhibition of expression of host target genes, as part of a novel viral mechanism of attacking a host. Accordingly, utilities of VGR387 gene include diagnosis, prevention and treatment of viral infection by. Specific functions, and accordingly utilities, of VGR387 gene, herein designated VGR GENE, correlate with, and may be deduced from, the identity of the host target genes, which are inhibited by VGAM RNAs comprised in the operon-like cluster of VGR387 gene: VGAM133 host target protein, VGAM134 host target protein, VGAM135 host target protein, VGAM136 host target protein, VGAM137 host target protein, VGAM138 host target protein and VGAM139 host target protein, herein schematically represented by VGAM1 HOST TARGET PROTEIN through VGAM HOST TARGET PROTEIN respectively. The function of these host target genes is elaborated hereinabove with reference to VGAM133, VGAM134, VGAM135, VGAM136, VGAM137, VGAM138 and VGAM139

[5331] FIG. 9 further provides a conceptual description of novel bioinformatically detected regulatory viral gene, referred to here as Viral Genomic Record 388(VGR388) viral gene, which encodes an operon-like cluster of novel viral micro RNA-like genes, each of which in turn modulates expression of at least one host target gene, the function and utility of which at least one host target gene is known in the art.

[5332] VGR388 gene, herein designated VGR GENE, is a novel bioinformatically detected regulatory, non protein coding, RNA viral gene. The method by which VGR388 gene was detected is described hereinabove with reference to FIGS. 6-15.

[5333] VGR388 gene encodes VGR388 precursor RNA, herein designated VGR PRECURSOR RNA, an RNA molecule, typically several hundred nucleotides long.

[5334] VGR388 precursor RNA folds spatially, forming VGR388 folded precursor RNA, herein designated VGR FOLDED PRECURSOR RNA. It is appreciated that VGR388 folded precursor RNA, herein designated VGR FOLDED PRECURSOR RNA, comprises a plurality of what is known in the art as hairpin structures. These hairpin structures are due to the fact that the nucleotide sequence of VGR388 precursor RNA comprises a plurality of segments, the first half of each such segment having a nucleotide sequence which is at least a partial inversed-reversed sequence of the second half thereof, as is well known in the art.

[5335] VGR388 folded precursor RNA, herein designated VGR FOLDED PRECURSOR RNA, is naturally processed by cellular enzymatic activity into at least 2 separate VGAM precursor RNAs, VGAM140 precursor RNA and VGAM141 precursor RNA, herein schematically represented by VGAM1 PRECURSOR and VGAM2 PRECURSOR respectively, each of which VGAM precursor RNAs being a hairpin shaped RNA segment, corresponding to VGAM PRECURSOR RNA of FIG. 8.

[5336] The above mentioned VGAM precursor RNAs are diced by DICER COMPLEX of FIG. 8, yielding respective short RNA segments of about 22 nucleotides in length, VGAM140 RNA and VGAM141 RNA respectively, herein schematically represented by VGAM1 RNA and VGAM2 RNA respectively, each of which VGAM RNAs corresponding to VGAM RNA of FIG. 8.

[5337] VGAM140 RNA, herein schematically represented by VGAM1 binds complimentarily to a host target binding site located in an untranslated region of VGAM140 host target RNA, herein schematically represented by VGAM1 HOST TARGET RNA, which host target binding site corresponds to a host target binding site such as BINDING SITE I, BINDING SITE II or BINDING SITE III of FIG. 1, thereby inhibiting translation of VGAM140 host target RNA, herein schematically represented by VGAM1 HOST TARGET RNA into VGAM140 host target protein, herein schematically represented by VGAM1 HOST TARGET PROTEIN, both of FIG. 1.

[5338] VGAM141 RNA, herein schematically represented by VGAM2 binds complimentarily to a host target binding site located in an untranslated region of VGAM141 host target RNA, herein schematically represented by VGAM2 HOST TARGET RNA, which host target binding site corresponds to a host target binding site such as BINDING SITE I, BINDING SITE II or BINDING SITE III of FIG. 1, thereby inhibiting translation of VGAM141 host target RNA, herein schematically represented by VGAM2 HOST TARGET RNA into VGAM141 host target protein, herein schematically represented by VGAM2 HOST TARGET PROTEIN, both of FIG. 1.

[5339] It is appreciated that a function of VGR388 gene, herein designated VGR GENE, is inhibition of expression of host target genes, as part of a novel viral mechanism of attacking a host. Accordingly, utilities of VGR388 gene include diagnosis, prevention and treatment of viral infection by. Specific functions, and accordingly utilities, of VGR388 gene, herein designated VGR GENE, correlate with, and may be deduced from, the identity of the host target genes, which are inhibited by VGAM RNAs comprised in the operon-like cluster of VGR388 gene: VGAM140 host target protein and VGAM141 host target protein, herein schematically represented by VGAM1 HOST TARGET PROTEIN and VGAM HOST TARGET PROTEIN respectively. The function of these host target genes is elaborated hereinabove with reference to VGAM140 and VGAM141

[5340] FIG. 9 further provides a conceptual description of novel bioinformatically detected regulatory viral gene, referred to here as Viral Genomic Record 389(VGR389) viral gene, which encodes an operon-like cluster of novel viral micro RNA-like genes, each of which in turn modulates expression of at least one host target gene, the function and utility of which at least one host target gene is known in the art.

[5341] VGR389 gene, herein designated VGR GENE, is a novel bioinformatically detected regulatory, non protein coding, RNA viral gene. The method by which VGR389 gene was detected is described hereinabove with reference to FIGS. 6-15.

[5342] VGR389 gene encodes VGR389 precursor RNA, herein designated VGR PRECURSOR RNA, an RNA molecule, typically several hundred nucleotides long.

[5343] VGR389 precursor RNA folds spatially, forming VGR389 folded precursor RNA, herein designated VGR FOLDED PRECURSOR RNA. It is appreciated that VGR389 folded precursor RNA, herein designated VGR FOLDED PRECURSOR RNA, comprises a plurality of what is known in the art as hairpin structures. These hairpin structures are due to the fact that the nucleotide sequence of VGR389 precursor RNA comprises a plurality of segments, the first half of each such segment having a nucleotide sequence which is at least a partial inversed-reversed sequence of the second half thereof, as is well known in the art.

[5344] VGR389 folded precursor RNA, herein designated VGR FOLDED PRECURSOR RNA, is naturally processed by cellular enzymatic activity into at least 6 separate VGAM precursor RNAs, VGAM142 precursor RNA, VGAM143 precursor RNA, VGAM144 precursor RNA, VGAM145 precursor RNA, VGAM146 precursor RNA and VGAM147 precursor RNA, herein schematically represented by VGAM1 PRECURSOR, VGAM2 PRECURSOR, VGAM3 PRECURSOR, VGAM4 PRECURSOR, VGAM5 PRECURSOR and VGAM6 PRECURSOR respectively, each of which VGAM precursor RNAs being a hairpin shaped RNA segment, corresponding to VGAM PRECURSOR RNA of FIG. 8.

[5345] The above mentioned VGAM precursor RNAs are diced by DICER COMPLEX of FIG. 8, yielding respective short RNA segments of about 22 nucleotides in length, VGAM142 RNA, VGAM143 RNA, VGAM144 RNA, VGAM145 RNA, VGAM146 RNA and VGAM147 RNA respectively, herein schematically represented by VGAM1 RNA, VGAM2 RNA, VGAM3 RNA, VGAM4 RNA, VGAM5 RNA and VGAM6 RNA respectively, each of which VGAM RNAs corresponding to VGAM RNA of FIG. 8.

[5346] VGAM142 RNA, herein schematically represented by VGAM1 binds complimentarily to a host target binding site located in an untranslated region of VGAM142 host target RNA, herein schematically represented by VGAM1 HOST TARGET RNA, which host target binding site corresponds to a host target binding site such as BINDING SITE 1, BINDING SITE II or BINDING SITE III of FIG. 1, thereby inhibiting translation of VGAM142 host target RNA, herein schematically represented by VGAM1 HOST TARGET RNA into VGAM142 host target protein, herein schematically represented by VGAM1 HOST TARGET PROTEIN, both of FIG. 1.

[5347] VGAM143 RNA, herein schematically represented by VGAM2 binds complimentarily to a host target binding site located in an untranslated region of VGAM143 host target RNA, herein schematically represented by VGAM2 HOST TARGET RNA, which host target binding site corresponds to a host target binding site such as BINDING SITE I, BINDING SITE II or BINDING SITE III of FIG. 1, thereby inhibiting translation of VGAM143 host target RNA, herein schematically represented by VGAM2 HOST TARGET RNA into VGAM143 host target protein, herein schematically represented by VGAM2 HOST TARGET PROTEIN, both of FIG. 1.

[5348] VGAM144 RNA, herein schematically represented by VGAM3 binds complimentarily to a host target binding site located in an untranslated region of VGAM144 host target RNA, herein schematically represented by VGAM3 HOST TARGET RNA, which host target binding site corresponds to a host target binding site such as BINDING SITE I, BINDING SITE II or BINDING SITE III of FIG. 1, thereby inhibiting translation of VGAM144 host target RNA, herein schematically represented by VGAM3 HOST TARGET RNA into VGAM144 host target protein, herein schematically represented by VGAM3 HOST TARGET PROTEIN, both of FIG. 1.

[5349] VGAM145 RNA, herein schematically represented by VGAM4 binds complimentarily to a host target binding site located in an untranslated region of VGAM145 host target RNA, herein schematically represented by VGAM4 HOST TARGET RNA, which host target binding site corresponds to a host target binding site such as BINDING SITE 1, BINDING SITE II or BINDING SITE III of FIG. 1, thereby inhibiting translation of VGAM145 host target RNA, herein schematically represented by VGAM4 HOST TARGET RNA into VGAM145 host target protein, herein schematically represented by VGAM4 HOST TARGET PROTEIN, both of FIG. 1.

[5350] VGAM146 RNA, herein schematically represented by VGAM5 binds complimentarily to a host target binding site located in an untranslated region of VGAM146 host target RNA, herein schematically represented by VGAM5 HOST TARGET RNA, which host target binding site corresponds to a host target binding site such as BINDING SITE 1, BINDING SITE II or BINDING SITE III of FIG. 1, thereby inhibiting translation of VGAM146 host target RNA, herein schematically represented by VGAM5 HOST TARGET RNA into VGAM146 host target protein, herein schematically represented by VGAM5 HOST TARGET PROTEIN, both of FIG. 1.

[5351] VGAM147 RNA, herein schematically represented by VGAM6 binds complimentarily to a host target binding site located in an untranslated region of VGAM147 host target RNA, herein schematically represented by VGAM6 HOST TARGET RNA, which host target binding site corresponds to a host target binding site such as BINDING SITE I, BINDING SITE II or BINDING SITE III of FIG. 1, thereby inhibiting translation of VGAM147 host target RNA, herein schematically represented by VGAM6 HOST TARGET RNA into VGAM147 host target protein, herein schematically represented by VGAM6 HOST TARGET PROTEIN, both of FIG. 1.

[5352] It is appreciated that a function of VGR389 gene, herein designated VGR GENE, is inhibition of expression of host target genes, as part of a novel viral mechanism of attacking a host. Accordingly, utilities of VGR389 gene include diagnosis, prevention and treatment of viral infection by. Specific functions, and accordingly utilities, of VGR389 gene, herein designated VGR GENE, correlate with, and may be deduced from, the identity of the host target genes, which are inhibited by VGAM RNAs comprised in the operon-like cluster of VGR389 gene: VGAM142 host target protein, VGAM143 host target protein, VGAM144 host target protein, VGAM145 host target protein, VGAM146 host target protein and VGAM147 host target protein, herein schematically represented by VGAM1 HOST TARGET PROTEIN through VGAM HOST TARGET PROTEIN respectively. The function of these host target genes is elaborated hereinabove with reference to VGAM142, VGAM143, VGAM144, VGAM145, VGAM146 and VGAM147

[5353] FIG. 9 further provides a conceptual description of novel bioinformatically detected regulatory viral gene, referred to here as Viral Genomic Record 390(VGR390) viral gene, which encodes an operon-like cluster of novel viral micro RNA-like genes, each of which in turn modulates expression of at least one host target gene, the function and utility of which at least one host target gene is known in the art.

[5354] VGR390 gene, herein designated VGR GENE, is a novel bioinformatically detected regulatory, non protein coding, RNA viral gene. The method by which VGR390 gene was detected is described hereinabove with reference to FIGS. 6-15.

[5355] VGR390 gene encodes VGR390 precursor RNA, herein designated VGR PRECURSOR RNA, an RNA molecule, typically several hundred nucleotides long.

[5356] VGR390 precursor RNA folds spatially, forming VGR390 folded precursor RNA, herein designated VGR FOLDED PRECURSOR RNA. It is appreciated that VGR390 folded precursor RNA, herein designated VGR FOLDED PRECURSOR RNA, comprises a plurality of what is known in the art as hairpin structures. These hairpin structures are due to the fact that the nucleotide sequence of VGR390 precursor RNA comprises a plurality of segments, the first half of each such segment having a nucleotide sequence which is at least a partial inversed-reversed sequence of the second half thereof, as is well known in the art.

[5357] VGR390 folded precursor RNA, herein designated VGR FOLDED PRECURSOR RNA, is naturally processed by cellular enzymatic activity into at least 2 separate VGAM precursor RNAs, VGAM148 precursor RNA and VGAM149 precursor RNA, herein schematically represented by VGAM1 PRECURSOR and VGAM2 PRECURSOR respectively, each of which VGAM precursor RNAs being a hairpin shaped RNA segment, corresponding to VGAM PRECURSOR RNA of FIG. 8.

[5358] The above mentioned VGAM precursor RNAs are diced by DICER COMPLEX of FIG. 8, yielding respective short RNA segments of about 22 nucleotides in length, VGAM148 RNA and VGAM149 RNA respectively, herein schematically represented by VGAM1 RNA and VGAM2 RNA respectively, each of which VGAM RNAs corresponding to VGAM RNA of FIG. 8.

[5359] VGAM148 RNA, herein schematically represented by VGAM1 binds complimentarily to a host target binding site located in an untranslated region of VGAM148 host target RNA, herein schematically represented by VGAM1 HOST TARGET RNA, which host target binding site corresponds to a host target binding site such as BINDING SITE I, BINDING SITE II or BINDING SITE III of FIG. 1, thereby inhibiting translation of VGAM148 host target RNA, herein schematically represented by VGAM1 HOST TARGET RNA into VGAM148 host target protein, herein schematically represented by VGAM1 HOST TARGET PROTEIN, both of FIG. 1.

[5360] VGAM149 RNA, herein schematically represented by VGAM2 binds complimentarily to a host target binding site located in an untranslated region of VGAM149 host target RNA, herein schematically represented by VGAM2 HOST TARGET RNA, which host target binding site corresponds to a host target binding site such as BINDING SITE 1, BINDING SITE II or BINDING SITE III of FIG. 1, thereby inhibiting translation of VGAM149 host target RNA, herein schematically represented by VGAM2 HOST TARGET RNA into VGAM149 host target protein, herein schematically represented by VGAM2 HOST TARGET PROTEIN, both of FIG. 1.

[5361] It is appreciated that a function of VGR390 gene, herein designated VGR GENE, is inhibition of expression of host target genes, as part of a novel viral mechanism of attacking a host. Accordingly, utilities of VGR390 gene include diagnosis, prevention and treatment of viral infection by. Specific functions, and accordingly utilities, of VGR390 gene, herein designated VGR GENE, correlate with, and may be deduced from, the identity of the host target genes, which are inhibited by VGAM RNAs comprised in the operon-like cluster of VGR390 gene: VGAM148 host target protein and VGAM149 host target protein, herein schematically represented by VGAM1 HOST TARGET PROTEIN and VGAM HOST TARGET PROTEIN respectively. The function of these host target genes is elaborated hereinabove with reference to VGAM148 and VGAM149

[5362] FIG. 9 further provides a conceptual description of novel bioinformatically detected regulatory viral gene, referred to here as Viral Genomic Record 391(VGR391) viral gene, which encodes an operon-like cluster of novel viral micro RNA-like genes, each of which in turn modulates expression of at least one host target gene, the function and utility of which at least one host target gene is known in the art.

[5363] VGR391 gene, herein designated VGR GENE, is a novel bioinformatically detected regulatory, non protein coding, RNA viral gene. The method by which VGR391 gene was detected is described hereinabove with reference to FIGS. 6-15.

[5364] VGR391 gene encodes VGR391 precursor RNA, herein designated VGR PRECURSOR RNA, an RNA molecule, typically several hundred nucleotides long.

[5365] VGR391 precursor RNA folds spatially, forming VGR391 folded precursor RNA, herein designated VGR FOLDED PRECURSOR RNA. It is appreciated that VGR391 folded precursor RNA, herein designated VGR FOLDED PRECURSOR RNA, comprises a plurality of what is known in the art as hairpin structures. These hairpin structures are due to the fact that the nucleotide sequence of VGR391 precursor RNA comprises a plurality of segments, the first half of each such segment having a nucleotide sequence which is at least a partial inversed-reversed sequence of the second half thereof, as is well known in the art.

[5366] VGR391 folded precursor RNA, herein designated VGR FOLDED PRECURSOR RNA, is naturally processed by cellular enzymatic activity into at least 2 separate VGAM precursor RNAs, VGAM150 precursor RNA and VGAM151 precursor RNA, herein schematically represented by VGAM1 PRECURSOR and VGAM2 PRECURSOR respectively, each of which VGAM precursor RNAs being a hairpin shaped RNA segment, corresponding to VGAM PRECURSOR RNA of FIG. 8.

[5367] The above mentioned VGAM precursor RNAs are diced by DICER COMPLEX of FIG. 8, yielding respective short RNA segments of about 22 nucleotides in length, VGAM150 RNA and VGAM151 RNA respectively, herein schematically represented by VGAM1 RNA and VGAM2 RNA respectively, each of which VGAM RNAs corresponding to VGAM RNA of FIG. 8.

[5368] VGAM150 RNA, herein schematically represented by VGAM1 binds complimentarily to a host target binding site located in an untranslated region of VGAM150 host target RNA, herein schematically represented by VGAM1 HOST TARGET RNA, which host target binding site corresponds to a host target binding site such as BINDING SITE I, BINDING SITE II or BINDING SITE III of FIG. 1, thereby inhibiting translation of VGAM150 host target RNA, herein schematically represented by VGAM1 HOST TARGET RNA into VGAM150 host target protein, herein schematically represented by VGAM1 HOST TARGET PROTEIN, both of FIG. 1.

[5369] VGAM151 RNA, herein schematically represented by VGAM2 binds complimentarily to a host target binding site located in an untranslated region of VGAM151 host target RNA, herein schematically represented by VGAM2 HOST TARGET RNA, which host target binding site corresponds to a host target binding site such as BINDING SITE I, BINDING SITE II or BINDING SITE III of FIG. 1, thereby inhibiting translation of VGAM151 host target RNA, herein schematically represented by VGAM2 HOST TARGET RNA into VGAM151 host target protein, herein schematically represented by VGAM2 HOST TARGET PROTEIN, both of FIG. 1.

[5370] It is appreciated that a function of VGR391 gene, herein designated VGR GENE, is inhibition of expression of host target genes, as part of a novel viral mechanism of attacking a host. Accordingly, utilities of VGR391 gene include diagnosis, prevention and treatment of viral infection by. Specific functions, and accordingly utilities, of VGR391 gene, herein designated VGR GENE, correlate with, and may be deduced from, the identity of the host target genes, which are inhibited by VGAM RNAs comprised in the operon-like cluster of VGR391 gene: VGAM150 host target protein and VGAM151 host target protein, herein schematically represented by VGAM1 HOST TARGET PROTEIN and VGAM HOST TARGET PROTEIN respectively. The function of these host target genes is elaborated hereinabove with reference to VGAM150 and VGAM151

[5371] FIG. 9 further provides a conceptual description of novel bioinformatically detected regulatory viral gene, referred to here as Viral Genomic Record 392(VGR392) viral gene, which encodes an operon-like cluster of novel viral micro RNA-like genes, each of which in turn modulates expression of at least one host target gene, the function and utility of which at least one host target gene is known in the art.

[5372] VGR392 gene, herein designated VGR GENE, is a novel bioinformatically detected regulatory, non protein coding, RNA viral gene. The method by which VGR392 gene was detected is described hereinabove with reference to FIGS. 6-15.

[5373] VGR392 gene encodes VGR392 precursor RNA, herein designated VGR PRECURSOR RNA, an RNA molecule, typically several hundred nucleotides long.

[5374] VGR392 precursor RNA folds spatially, forming VGR392 folded precursor RNA, herein designated VGR FOLDED PRECURSOR RNA. It is appreciated that VGR392 folded precursor RNA, herein designated VGR FOLDED PRECURSOR RNA, comprises a plurality of what is known in the art as hairpin structures. These hairpin structures are due to the fact that the nucleotide sequence of VGR392 precursor RNA comprises a plurality of segments, the first half of each such segment having a nucleotide sequence which is at least a partial inversed-reversed sequence of the second half thereof, as is well known in the art.

[5375] VGR392 folded precursor RNA, herein designated VGR FOLDED PRECURSOR RNA, is naturally processed by cellular enzymatic activity into at least 4 separate VGAM precursor RNAs, VGAM154 precursor RNA, VGAM155 precursor RNA, VGAM156 precursor RNA and VGAM157 precursor RNA, herein schematically represented by VGAM1 PRECURSOR, VGAM2 PRECURSOR, VGAM3 PRECURSOR and VGAM4 PRECURSOR respectively, each of which VGAM precursor RNAs being a hairpin shaped RNA segment, corresponding to VGAM PRECURSOR RNA of FIG. 8.

[5376] The above mentioned VGAM precursor RNAs are diced by DICER COMPLEX of FIG. 8, yielding respective short RNA segments of about 22 nucleotides in length, VGAM154 RNA, VGAM155 RNA, VGAM156 RNA and VGAM157 RNA respectively, herein schematically represented by VGAM1 RNA, VGAM2 RNA, VGAM3 RNA and VGAM4 RNA respectively, each of which VGAM RNAs corresponding to VGAM RNA of FIG. 8.

[5377] VGAM154 RNA, herein schematically represented by VGAM1 binds complimentarily to a host target binding site located in an untranslated region of VGAM154 host target RNA, herein schematically represented by VGAM1 HOST TARGET RNA, which host target binding site corresponds to a host target binding site such as BINDING SITE 1, BINDING SITE II or BINDING SITE III of FIG. 1, thereby inhibiting translation of VGAM154 host target RNA, herein schematically represented by VGAM1 HOST TARGET RNA into VGAM154 host target protein, herein schematically represented by VGAM1 HOST TARGET PROTEIN, both of FIG. 1.

[5378] VGAM155 RNA, herein schematically represented by VGAM2 binds complimentarily to a host target binding site located in an untranslated region of VGAM155 host target RNA, herein schematically represented by VGAM2 HOST TARGET RNA, which host target binding site corresponds to a host target binding site such as BINDING SITE 1, BINDING SITE II or BINDING SITE III of FIG. 1, thereby inhibiting translation of VGAM155 host target RNA, herein schematically represented by VGAM2 HOST TARGET RNA into VGAM155 host target protein, herein schematically represented by VGAM2 HOST TARGET PROTEIN, both of FIG. 1.

[5379] VGAM156 RNA, herein schematically represented by VGAM3 binds complimentarily to a host target binding site located in an untranslated region of VGAM156 host target RNA, herein schematically represented by VGAM3 HOST TARGET RNA, which host target binding site corresponds to a host target binding site such as BINDING SITE 1, BINDING SITE II or BINDING SITE III of FIG. 1, thereby inhibiting translation of VGAM156 host target RNA, herein schematically represented by VGAM3 HOST TARGET RNA into VGAM156 host target protein, herein schematically represented by VGAM3 HOST TARGET PROTEIN, both of FIG. 1.

[5380] VGAM157 RNA, herein schematically represented by VGAM4 binds complimentarily to a host target binding site located in an untranslated region of VGAM157 host target RNA, herein schematically represented by VGAM4 HOST TARGET RNA, which host target binding site corresponds to a host target binding site such as BINDING SITE 1, BINDING SITE II or BINDING SITE III of FIG. 1, thereby inhibiting translation of VGAM157 host target RNA, herein schematically represented by VGAM4 HOST TARGET RNA into VGAM157 host target protein, herein schematically represented by VGAM4 HOST TARGET PROTEIN, both of FIG. 1.

[5381] It is appreciated that a function of VGR392 gene, herein designated VGR GENE, is inhibition of expression of host target genes, as part of a novel viral mechanism of attacking a host. Accordingly, utilities of VGR392 gene include diagnosis, prevention and treatment of viral infection by. Specific functions, and accordingly utilities, of VGR392 gene, herein designated VGR GENE, correlate with, and may be deduced from, the identity of the host target genes, which are inhibited by VGAM RNAs comprised in the operon-like cluster of VGR392 gene: VGAM154 host target protein, VGAM155 host target protein, VGAM156 host target protein and VGAM157 host target protein, herein schematically represented by VGAM1 HOST TARGET PROTEIN through VGAM HOST TARGET PROTEIN respectively. The function of these host target genes is elaborated hereinabove with reference to VGAM154, VGAM155, VGAM156 and VGAM157

[5382] FIG. 9 further provides a conceptual description of novel bioinformatically detected regulatory viral gene, referred to here as Viral Genomic Record 393(VGR393) viral gene, which encodes an operon-like cluster of novel viral micro RNA-like genes, each of which in turn modulates expression of at least one host target gene, the function and utility of which at least one host target gene is known in the art.

[5383] VGR393 gene, herein designated VGR GENE, is a novel bioinformatically detected regulatory, non protein coding, RNA viral gene. The method by which VGR393 gene was detected is described hereinabove with reference to FIGS. 6-15.

[5384] VGR393 gene encodes VGR393 precursor RNA, herein designated VGR PRECURSOR RNA, an RNA molecule, typically several hundred nucleotides long.

[5385] VGR393 precursor RNA folds spatially, forming VGR393 folded precursor RNA, herein designated VGR FOLDED PRECURSOR RNA. It is appreciated that VGR393 folded precursor RNA, herein designated VGR FOLDED PRECURSOR RNA, comprises a plurality of what is known in the art as hairpin structures. These hairpin structures are due to the fact that the nucleotide sequence of VGR393 precursor RNA comprises a plurality of segments, the first half of each such segment having a nucleotide sequence which is at least a partial inversed-reversed sequence of the second half thereof, as is well known in the art.

[5386] VGR393 folded precursor RNA, herein designated VGR FOLDED PRECURSOR RNA, is naturally processed by cellular enzymatic activity into at least 5 separate VGAM precursor RNAs, VGAM158 precursor RNA, VGAM159 precursor RNA, VGAM160 precursor RNA, VGAM161 precursor RNA and VGAM162 precursor RNA, herein schematically represented by VGAM1 PRECURSOR, VGAM2 PRECURSOR, VGAM3 PRECURSOR, VGAM4 PRECURSOR and VGAM5 PRECURSOR respectively, each of which VGAM precursor RNAs being a hairpin shaped RNA segment, corresponding to VGAM PRECURSOR RNA of FIG. 8.

[5387] The above mentioned VGAM precursor RNAs are diced by DICER COMPLEX of FIG. 8, yielding respective short RNA segments of about 22 nucleotides in length, VGAM158 RNA, VGAM159 RNA, VGAM160 RNA, VGAM161 RNA and VGAM162 RNA respectively, herein schematically represented by VGAM1 RNA, VGAM2 RNA, VGAM3 RNA, VGAM4 RNA and VGAM5 RNA respectively, each of which VGAM RNAs corresponding to VGAM RNA of FIG. 8.

[5388] VGAM158 RNA, herein schematically represented by VGAM1 binds complimentarily to a host target binding site located in an untranslated region of VGAM158 host target RNA, herein schematically represented by VGAM1 HOST TARGET RNA, which host target binding site corresponds to a host target binding site such as BINDING SITE I, BINDING SITE II or BINDING SITE III of FIG. 1, thereby inhibiting translation of VGAM158 host target RNA, herein schematically represented by VGAM1 HOST TARGET RNA into VGAM158 host target protein, herein schematically represented by VGAM1 HOST TARGET PROTEIN, both of FIG. 1.

[5389] VGAM159 RNA, herein schematically represented by VGAM2 binds complimentarily to a host target binding site located in an untranslated region of VGAM159 host target RNA, herein schematically represented by VGAM2 HOST TARGET RNA, which host target binding site corresponds to a host target binding site such as BINDING SITE 1, BINDING SITE II or BINDING SITE III of FIG. 1, thereby inhibiting translation of VGAM159 host target RNA, herein schematically represented by VGAM2 HOST TARGET RNA into VGAM159 host target protein, herein schematically represented by VGAM2 HOST TARGET PROTEIN, both of FIG. 1.

[5390] VGAM160 RNA, herein schematically represented by VGAM3 binds complimentarily to a host target binding site located in an untranslated region of VGAM160 host target RNA, herein schematically represented by VGAM3 HOST TARGET RNA, which host target binding site corresponds to a host target binding site such as BINDING SITE 1, BINDING SITE II or BINDING SITE III of FIG. 1, thereby inhibiting translation of VGAM160 host target RNA, herein schematically represented by VGAM3 HOST TARGET RNA into VGAM160 host target protein, herein schematically represented by VGAM3 HOST TARGET PROTEIN, both of FIG. 1.

[5391] VGAM161 RNA, herein schematically represented by VGAM4 binds complimentarily to a host target binding site located in an untranslated region of VGAM161 host target RNA, herein schematically represented by VGAM4 HOST TARGET RNA, which host target binding site corresponds to a host target binding site such as BINDING SITE I, BINDING SITE II or BINDING SITE III of FIG. 1, thereby inhibiting translation of VGAM161 host target RNA, herein schematically represented by VGAM4 HOST TARGET RNA into VGAM161 host target protein, herein schematically represented by VGAM4 HOST TARGET PROTEIN, both of FIG. 1.

[5392] VGAM162 RNA, herein schematically represented by VGAM5 binds complimentarily to a host target binding site located in an untranslated region of VGAM162 host target RNA, herein schematically represented by VGAM5 HOST TARGET RNA, which host target binding site corresponds to a host target binding site such as BINDING SITE I, BINDING SITE II or BINDING SITE III of FIG. 1, thereby inhibiting translation of VGAM162 host target RNA, herein schematically represented by VGAM5 HOST TARGET RNA into VGAM162 host target protein, herein schematically represented by VGAM5 HOST TARGET PROTEIN, both of FIG. 1.

[5393] It is appreciated that a function of VGR393 gene, herein designated VGR GENE, is inhibition of expression of host target genes, as part of a novel viral mechanism of attacking a host. Accordingly, utilities of VGR393 gene include diagnosis, prevention and treatment of viral infection by. Specific functions, and accordingly utilities, of VGR393 gene, herein designated VGR GENE, correlate with, and may be deduced from, the identity of the host target genes, which are inhibited by VGAM RNAs comprised in the operon-like cluster of VGR393 gene: VGAM158 host target protein, VGAM159 host target protein, VGAM160 host target protein, VGAM161 host target protein and VGAM162 host target protein, herein schematically represented by VGAM1 HOST TARGET PROTEIN through VGAM HOST TARGET PROTEIN respectively. The function of these host target genes is elaborated hereinabove with reference to VGAM158, VGAM159, VGAM160, VGAM161 and VGAM162

[5394] FIG. 9 further provides a conceptual description of novel bioinformatically detected regulatory viral gene, referred to here as Viral Genomic Record 394(VGR394) viral gene, which encodes an operon-like cluster of novel viral micro RNA-like genes, each of which in turn modulates expression of at least one host target gene, the function and utility of which at least one host target gene is known in the art.

[5395] VGR394 gene, herein designated VGR GENE, is a novel bioinformatically detected regulatory, non protein coding, RNA viral gene. The method by which VGR394 gene was detected is described hereinabove with reference to FIGS. 6-15.

[5396] VGR394 gene encodes VGR394 precursor RNA, herein designated VGR PRECURSOR RNA, an RNA molecule, typically several hundred nucleotides long.

[5397] VGR394 precursor RNA folds spatially, forming VGR394 folded precursor RNA, herein designated VGR FOLDED PRECURSOR RNA. It is appreciated that VGR394 folded precursor RNA, herein designated VGR FOLDED PRECURSOR RNA, comprises a plurality of what is known in the art as hairpin structures. These hairpin structures are due to the fact that the nucleotide sequence of VGR394 precursor RNA comprises a plurality of segments, the first half of each such segment having a nucleotide sequence which is at least a partial inversed-reversed sequence of the second half thereof, as is well known in the art.

[5398] VGR394 folded precursor RNA, herein designated VGR FOLDED PRECURSOR RNA, is naturally processed by cellular enzymatic activity into at least 6 separate VGAM precursor RNAs, VGAM163 precursor RNA, VGAM164 precursor RNA, VGAM165 precursor RNA, VGAM166 precursor RNA, VGAM167 precursor RNA and VGAM168 precursor RNA, herein schematically represented by VGAM1 PRECURSOR, VGAM2 PRECURSOR, VGAM3 PRECURSOR, VGAM4 PRECURSOR, VGAM5 PRECURSOR and VGAM6 PRECURSOR respectively, each of which VGAM precursor RNAs being a hairpin shaped RNA segment, corresponding to VGAM PRECURSOR RNA of FIG. 8.

[5399] The above mentioned VGAM precursor RNAs are diced by DICER COMPLEX of FIG. 8, yielding respective short RNA segments of about 22 nucleotides in length, VGAM163 RNA, VGAM164 RNA, VGAM165 RNA, VGAM166 RNA, VGAM167 RNA and VGAM168 RNA respectively, herein schematically represented by VGAM1 RNA, VGAM2 RNA, VGAM3 RNA, VGAM4 RNA, VGAM5 RNA and VGAM6 RNA respectively, each of which VGAM RNAs corresponding to VGAM RNA of FIG. 8.

[5400] VGAM163 RNA, herein schematically represented by VGAM1 binds complimentarily to a host target binding site located in an untranslated region of VGAM163 host target RNA, herein schematically represented by VGAM1 HOST TARGET RNA, which host target binding site corresponds to a host target binding site such as BINDING SITE I, BINDING SITE II or BINDING SITE III of FIG. 1, thereby inhibiting translation of VGAM163 host target RNA, herein schematically represented by VGAM1 HOST TARGET RNA into VGAM163 host target protein, herein schematically represented by VGAM1 HOST TARGET PROTEIN, both of FIG. 1.

[5401] VGAM164 RNA, herein schematically represented by VGAM2 binds complimentarily to a host target binding site located in an untranslated region of VGAM164 host target RNA, herein schematically represented by VGAM2 HOST TARGET RNA, which host target binding site corresponds to a host target binding site such as BINDING SITE I, BINDING SITE II or BINDING SITE III of FIG. 1, thereby inhibiting translation of VGAM164 host target RNA, herein schematically represented by VGAM2 HOST TARGET RNA into VGAM164 host target protein, herein schematically represented by VGAM2 HOST TARGET PROTEIN, both of FIG. 1.

[5402] VGAM165 RNA, herein schematically represented by VGAM3 binds complimentarily to a host target binding site located in an untranslated region of VGAM165 host target RNA, herein schematically represented by VGAM3 HOST TARGET RNA, which host target binding site corresponds to a host target binding site such as BINDING SITE 1, BINDING SITE II or BINDING SITE III of FIG. 1, thereby inhibiting translation of VGAM165 host target RNA, herein schematically represented by VGAM3 HOST TARGET RNA into VGAM165 host target protein, herein schematically represented by VGAM3 HOST TARGET PROTEIN, both of FIG. 1.

[5403] VGAM166 RNA, herein schematically represented by VGAM4 binds complimentarily to a host target binding site located in an untranslated region of VGAM166 host target RNA, herein schematically represented by VGAM4 HOST TARGET RNA, which host target binding site corresponds to a host target binding site such as BINDING SITE 1, BINDING SITE II or BINDING SITE III of FIG. 1, thereby inhibiting translation of VGAM166 host target RNA, herein schematically represented by VGAM4 HOST TARGET RNA into VGAM166 host target protein, herein schematically represented by VGAM4 HOST TARGET PROTEIN, both of FIG. 1.

[5404] VGAM167 RNA, herein schematically represented by VGAM5 binds complimentarily to a host target binding site located in an untranslated region of VGAM167 host target RNA, herein schematically represented by VGAM5 HOST TARGET RNA, which host target binding site corresponds to a host target binding site such as BINDING SITE 1, BINDING SITE II or BINDING SITE III of FIG. 1, thereby inhibiting translation of VGAM167 host target RNA, herein schematically represented by VGAM5 HOST TARGET RNA into VGAM167 host target protein, herein schematically represented by VGAM5 HOST TARGET PROTEIN, both of FIG. 1.

[5405] VGAM168 RNA, herein schematically represented by VGAM6 binds complimentarily to a host target binding site located in an untranslated region of VGAM168 host target RNA, herein schematically represented by VGAM6 HOST TARGET RNA, which host target binding site corresponds to a host target binding site such as BINDING SITE 1, BINDING SITE II or BINDING SITE III of FIG. 1, thereby inhibiting translation of VGAM168 host target RNA, herein schematically represented by VGAM6 HOST TARGET RNA into VGAM168 host target protein, herein schematically represented by VGAM6 HOST TARGET PROTEIN, both of FIG. 1.

[5406] It is appreciated that a function of VGR394 gene, herein designated VGR GENE, is inhibition of expression of host target genes, as part of a novel viral mechanism of attacking a host. Accordingly, utilities of VGR394 gene include diagnosis, prevention and treatment of viral infection by. Specific functions, and accordingly utilities, of VGR394 gene, herein designated VGR GENE, correlate with, and may be deduced from, the identity of the host target genes, which are inhibited by VGAM RNAs comprised in the operon-like cluster of VGR394 gene: VGAM163 host target protein, VGAM164 host target protein, VGAM165 host target protein, VGAM166 host target protein, VGAM167 host target protein and VGAM168 host target protein, herein schematically represented by VGAM1 HOST TARGET PROTEIN through VGAM HOST TARGET PROTEIN respectively. The function of these host target genes is elaborated hereinabove with reference to VGAM163, VGAM164, VGAM165, VGAM166, VGAM167 and VGAM168

[5407] FIG. 9 further provides a conceptual description of novel bioinformatically detected regulatory viral gene, referred to here as Viral Genomic Record 395(VGR395) viral gene, which encodes an operon-like cluster of novel viral micro RNA-like genes, each of which in turn modulates expression of at least one host target gene, the function and utility of which at least one host target gene is known in the art.

[5408] VGR395 gene, herein designated VGR GENE, is a novel bioinformatically detected regulatory, non protein coding, RNA viral gene. The method by which VGR395 gene was detected is described hereinabove with reference to FIGS. 6-15.

[5409] VGR395 gene encodes VGR395 precursor RNA, herein designated VGR PRECURSOR RNA, an RNA molecule, typically several hundred nucleotides long.

[5410] VGR395 precursor RNA folds spatially, forming VGR395 folded precursor RNA, herein designated VGR FOLDED PRECURSOR RNA. It is appreciated that VGR395 folded precursor RNA, herein designated VGR FOLDED PRECURSOR RNA, comprises a plurality of what is known in the art as hairpin structures. These hairpin structures are due to the fact that the nucleotide sequence of VGR395 precursor RNA comprises a plurality of segments, the first half of each such segment having a nucleotide sequence which is at least a partial inversed-reversed sequence of the second half thereof, as is well known in the art.

[5411] VGR395 folded precursor RNA, herein designated VGR FOLDED PRECURSOR RNA, is naturally processed by cellular enzymatic activity into at least 2 separate VGAM precursor RNAs, VGAM169 precursor RNA and VGAM170 precursor RNA, herein schematically represented by VGAM1 PRECURSOR and VGAM2 PRECURSOR respectively, each of which VGAM precursor RNAs being a hairpin shaped RNA segment, corresponding to VGAM PRECURSOR RNA of FIG. 8.

[5412] The above mentioned VGAM precursor RNAs are diced by DICER COMPLEX of FIG. 8, yielding respective short RNA segments of about 22 nucleotides in length, VGAM169 RNA and VGAM170 RNA respectively, herein schematically represented by VGAM1 RNA and VGAM2 RNA respectively, each of which VGAM RNAs corresponding to VGAM RNA of FIG. 8.

[5413] VGAM169 RNA, herein schematically represented by VGAM1 binds complimentarily to a host target binding site located in an untranslated region of VGAM169 host target RNA, herein schematically represented by VGAM1 HOST TARGET RNA, which host target binding site corresponds to a host target binding site such as BINDING SITE I, BINDING SITE II or BINDING SITE III of FIG. 1, thereby inhibiting translation of VGAM169 host target RNA, herein schematically represented by VGAM1 HOST TARGET RNA into VGAM169 host target protein, herein schematically represented by VGAM1 HOST TARGET PROTEIN, both of FIG. 1.

[5414] VGAM170 RNA, herein schematically represented by VGAM2 binds complimentarily to a host target binding site located in an untranslated region of VGAM170 host target RNA, herein schematically represented by VGAM2 HOST TARGET RNA, which host target binding site corresponds to a host target binding site such as BINDING SITE 1, BINDING SITE II or BINDING SITE III of FIG. 1, thereby inhibiting translation of VGAM170 host target RNA, herein schematically represented by VGAM2 HOST TARGET RNA into VGAM170 host target protein, herein schematically represented by VGAM2 HOST TARGET PROTEIN, both of FIG. 1.

[5415] It is appreciated that a function of VGR395 gene, herein designated VGR GENE, is inhibition of expression of host target genes, as part of a novel viral mechanism of attacking a host. Accordingly, utilities of VGR395 gene include diagnosis, prevention and treatment of viral infection by. Specific functions, and accordingly utilities, of VGR395 gene, herein designated VGR GENE, correlate with, and may be deduced from, the identity of the host target genes, which are inhibited by VGAM RNAs comprised in the operon-like cluster of VGR395 gene: VGAM169 host target protein and VGAM170 host target protein, herein schematically represented by VGAM1 HOST TARGET PROTEIN and VGAM HOST TARGET PROTEIN respectively. The function of these host target genes is elaborated hereinabove with reference to VGAM169 and VGAM170

[5416] FIG. 9 further provides a conceptual description of novel bioinformatically detected regulatory viral gene, referred to here as Viral Genomic Record 396(VGR396) viral gene, which encodes an operon-like cluster of novel viral micro RNA-like genes, each of which in turn modulates expression of at least one host target gene, the function and utility of which at least one host target gene is known in the art.

[5417] VGR396 gene, herein designated VGR GENE, is a novel bioinformatically detected regulatory, non protein coding, RNA viral gene. The method by which VGR396 gene was detected is described hereinabove with reference to FIGS. 6-15.

[5418] VGR396 gene encodes VGR396 precursor RNA, herein designated VGR PRECURSOR RNA, an RNA molecule, typically several hundred nucleotides long.

[5419] VGR396 precursor RNA folds spatially, forming VGR396 folded precursor RNA, herein designated VGR FOLDED PRECURSOR RNA. It is appreciated that VGR396 folded precursor RNA, herein designated VGR FOLDED PRECURSOR RNA, comprises a plurality of what is known in the art as hairpin structures. These hairpin structures are due to the fact that the nucleotide sequence of VGR396 precursor RNA comprises a plurality of segments, the first half of each such segment having a nucleotide sequence which is at least a partial inversed-reversed sequence of the second half thereof, as is well known in the art.

[5420] VGR396 folded precursor RNA, herein designated VGR FOLDED PRECURSOR RNA, is naturally processed by cellular enzymatic activity into at least 2 separate VGAM precursor RNAs, VGAM171 precursor RNA and VGAM172 precursor RNA, herein schematically represented by VGAM1 PRECURSOR and VGAM2 PRECURSOR respectively, each of which VGAM precursor RNAs being a hairpin shaped RNA segment, corresponding to VGAM PRECURSOR RNA of FIG. 8.

[5421] The above mentioned VGAM precursor RNAs are diced by DICER COMPLEX of FIG. 8, yielding respective short RNA segments of about 22 nucleotides in length, VGAM171 RNA and VGAM172 RNA respectively, herein schematically represented by VGAM1 RNA and VGAM2 RNA respectively, each of which VGAM RNAs corresponding to VGAM RNA of FIG. 8.

[5422] VGAM171 RNA, herein schematically represented by VGAM1 binds complimentarily to a host target binding site located in an untranslated region of VGAM171 host target RNA, herein schematically represented by VGAM1 HOST TARGET RNA, which host target binding site corresponds to a host target binding site such as BINDING SITE I, BINDING SITE II or BINDING SITE III of FIG. 1, thereby inhibiting translation of VGAM171 host target RNA, herein schematically represented by VGAM1 HOST TARGET RNA into VGAM171 host target protein, herein schematically represented by VGAM1 HOST TARGET PROTEIN, both of FIG. 1.

[5423] VGAM172 RNA, herein schematically represented by VGAM2 binds complimentarily to a host target binding site located in an untranslated region of VGAM172 host target RNA, herein schematically represented by VGAM2 HOST TARGET RNA, which host target binding site corresponds to a host target binding site such as BINDING SITE I, BINDING SITE II or BINDING SITE III of FIG. 1, thereby inhibiting translation of VGAM172 host target RNA, herein schematically represented by VGAM2 HOST TARGET RNA into VGAM172 host target protein, herein schematically represented by VGAM2 HOST TARGET PROTEIN, both of FIG. 1.

[5424] It is appreciated that a function of VGR396 gene, herein designated VGR GENE, is inhibition of expression of host target genes, as part of a novel viral mechanism of attacking a host. Accordingly, utilities of VGR396 gene include diagnosis, prevention and treatment of viral infection by. Specific functions, and accordingly utilities, of VGR396 gene, herein designated VGR GENE, correlate with, and may be deduced from, the identity of the host target genes, which are inhibited by VGAM RNAs comprised in the operon-like cluster of VGR396 gene: VGAM171 host target protein and VGAM172 host target protein, herein schematically represented by VGAM1 HOST TARGET PROTEIN and VGAM HOST TARGET PROTEIN respectively. The function of these host target genes is elaborated hereinabove with reference to VGAM171 and VGAM172

[5425] FIG. 9 further provides a conceptual description of novel bioinformatically detected regulatory viral gene, referred to here as Viral Genomic Record 397(VGR397) viral gene, which encodes an operon-like cluster of novel viral micro RNA-like genes, each of which in turn modulates expression of at least one host target gene, the function and utility of which at least one host target gene is known in the art.

[5426] VGR397 gene, herein designated VGR GENE, is a novel bioinformatically detected regulatory, non protein coding, RNA viral gene. The method by which VGR397 gene was detected is described hereinabove with reference to FIGS. 6-15.

[5427] VGR397 gene encodes VGR397 precursor RNA, herein designated VGR PRECURSOR RNA, an RNA molecule, typically several hundred nucleotides long.

[5428] VGR397 precursor RNA folds spatially, forming VGR397 folded precursor RNA, herein designated VGR FOLDED PRECURSOR RNA. It is appreciated that VGR397 folded precursor RNA, herein designated VGR FOLDED PRECURSOR RNA, comprises a plurality of what is known in the art as hairpin structures. These hairpin structures are due to the fact that the nucleotide sequence of VGR397 precursor RNA comprises a plurality of segments, the first half of each such segment having a nucleotide sequence which is at least a partial inversed-reversed sequence of the second half thereof, as is well known in the art.

[5429] VGR397 folded precursor RNA, herein designated VGR FOLDED PRECURSOR RNA, is naturally processed by cellular enzymatic activity into at least 2 separate VGAM precursor RNAs, VGAM173 precursor RNA and VGAM174 precursor RNA, herein schematically represented by VGAM1 PRECURSOR and VGAM2 PRECURSOR respectively, each of which VGAM precursor RNAs being a hairpin shaped RNA segment, corresponding to VGAM PRECURSOR RNA of FIG. 8.

[5430] The above mentioned VGAM precursor RNAs are diced by DICER COMPLEX of FIG. 8, yielding respective short RNA segments of about 22 nucleotides in length, VGAM173 RNA and VGAM174 RNA respectively, herein schematically represented by VGAM1 RNA and VGAM2 RNA respectively, each of which VGAM RNAs corresponding to VGAM RNA of FIG. 8.

[5431] VGAM173 RNA, herein schematically represented by VGAM1 binds complimentarily to a host target binding site located in an untranslated region of VGAM173 host target RNA, herein schematically represented by VGAM1 HOST TARGET RNA, which host target binding site corresponds to a host target binding site such as BINDING SITE I, BINDING SITE II or BINDING SITE III of FIG. 1, thereby inhibiting translation of VGAM173 host target RNA, herein schematically represented by VGAM1 HOST TARGET RNA into VGAM173 host target protein, herein schematically represented by VGAM1 HOST TARGET PROTEIN, both of FIG. 1.

[5432] VGAM174 RNA, herein schematically represented by VGAM2 binds complimentarily to a host target binding site located in an untranslated region of VGAM174 host target RNA, herein schematically represented by VGAM2 HOST TARGET RNA, which host target binding site corresponds to a host target binding site such as BINDING SITE I, BINDING SITE II or BINDING SITE III of FIG. 1, thereby inhibiting translation of VGAM174 host target RNA, herein schematically represented by VGAM2 HOST TARGET RNA into VGAM174 host target protein, herein schematically represented by VGAM2 HOST TARGET PROTEIN, both of FIG. 1.

[5433] It is appreciated that a function of VGR397 gene, herein designated VGR GENE, is inhibition of expression of host target genes, as part of a novel viral mechanism of attacking a host. Accordingly, utilities of VGR397 gene include diagnosis, prevention and treatment of viral infection by. Specific functions, and accordingly utilities, of VGR397 gene, herein designated VGR GENE, correlate with, and may be deduced from, the identity of the host target genes, which are inhibited by VGAM RNAs comprised in the operon-like cluster of VGR397 gene: VGAM173 host target protein and VGAM174 host target protein, herein schematically represented by VGAM1 HOST TARGET PROTEIN and VGAM HOST TARGET PROTEIN respectively. The function of these host target genes is elaborated hereinabove with reference to VGAM173 and VGAM174

[5434] FIG. 9 further provides a conceptual description of novel bioinformatically detected regulatory viral gene, referred to here as Viral Genomic Record 398(VGR398) viral gene, which encodes an operon-like cluster of novel viral micro RNA-like genes, each of which in turn modulates expression of at least one host target gene, the function and utility of which at least one host target gene is known in the art.

[5435] VGR398 gene, herein designated VGR GENE, is a novel bioinformatically detected regulatory, non protein coding, RNA viral gene. The method by which VGR398 gene was detected is described hereinabove with reference to FIGS. 6-15.

[5436] VGR398 gene encodes VGR398 precursor RNA, herein designated VGR PRECURSOR RNA, an RNA molecule, typically several hundred nucleotides long.

[5437] VGR398 precursor RNA folds spatially, forming VGR398 folded precursor RNA, herein designated VGR FOLDED PRECURSOR RNA. It is appreciated that VGR398 folded precursor RNA, herein designated VGR FOLDED PRECURSOR RNA, comprises a plurality of what is known in the art as hairpin structures. These hairpin structures are due to the fact that the nucleotide sequence of VGR398 precursor RNA comprises a plurality of segments, the first half of each such segment having a nucleotide sequence which is at least a partial inversed-reversed sequence of the second half thereof, as is well known in the art.

[5438] VGR398 folded precursor RNA, herein designated VGR FOLDED PRECURSOR RNA, is naturally processed by cellular enzymatic activity into at least 2 separate VGAM precursor RNAs, VGAM175 precursor RNA and VGAM176 precursor RNA, herein schematically represented by VGAM1 PRECURSOR and VGAM2 PRECURSOR respectively, each of which VGAM precursor RNAs being a hairpin shaped RNA segment, corresponding to VGAM PRECURSOR RNA of FIG. 8.

[5439] The above mentioned VGAM precursor RNAs are diced by DICER COMPLEX of FIG. 8, yielding respective short RNA segments of about 22 nucleotides in length, VGAM175 RNA and VGAM176 RNA respectively, herein schematically represented by VGAM1 RNA and VGAM2 RNA respectively, each of which VGAM RNAs corresponding to VGAM RNA of FIG. 8.

[5440] VGAM175 RNA, herein schematically represented by VGAM1 binds complimentarily to a host target binding site located in an untranslated region of VGAM175 host target RNA, herein schematically represented by VGAM1 HOST TARGET RNA, which host target binding site corresponds to a host target binding site such as BINDING SITE I, BINDING SITE II or BINDING SITE III of FIG. 1, thereby inhibiting translation of VGAM175 host target RNA, herein schematically represented by VGAM1 HOST TARGET RNA into VGAM175 host target protein, herein schematically represented by VGAM1 HOST TARGET PROTEIN, both of FIG. 1.

[5441] VGAM176 RNA, herein schematically represented by VGAM2 binds complimentarily to a host target binding site located in an untranslated region of VGAM176 host target RNA, herein schematically represented by VGAM2 HOST TARGET RNA, which host target binding site corresponds to a host target binding site such as BINDING SITE 1, BINDING SITE II or BINDING SITE III of FIG. 1, thereby inhibiting translation of VGAM176 host target RNA, herein schematically represented by VGAM2 HOST TARGET RNA into VGAM176 host target protein, herein schematically represented by VGAM2 HOST TARGET PROTEIN, both of FIG. 1.

[5442] It is appreciated that a function of VGR398 gene, herein designated VGR GENE, is inhibition of expression of host target genes, as part of a novel viral mechanism of attacking a host. Accordingly, utilities of VGR398 gene include diagnosis, prevention and treatment of viral infection by. Specific functions, and accordingly utilities, of VGR398 gene, herein designated VGR GENE, correlate with, and may be deduced from, the identity of the host target genes, which are inhibited by VGAM RNAs comprised in the operon-like cluster of VGR398 gene: VGAM175 host target protein and VGAM176 host target protein, herein schematically represented by VGAM1 HOST TARGET PROTEIN and VGAM HOST TARGET PROTEIN respectively. The function of these host target genes is elaborated hereinabove with reference to VGAM175 and VGAM176

[5443] FIG. 9 further provides a conceptual description of novel bioinformatically detected regulatory viral gene, referred to here as Viral Genomic Record 399(VGR399) viral gene, which encodes an operon-like cluster of novel viral micro RNA-like genes, each of which in turn modulates expression of at least one host target gene, the function and utility of which at least one host target gene is known in the art.

[5444] VGR399 gene, herein designated VGR GENE, is a novel bioinformatically detected regulatory, non protein coding, RNA viral gene. The method by which VGR399 gene was detected is described hereinabove with reference to FIGS. 6-15.

[5445] VGR399 gene encodes VGR399 precursor RNA, herein designated VGR PRECURSOR RNA, an RNA molecule, typically several hundred nucleotides long.

[5446] VGR399 precursor RNA folds spatially, forming VGR399 folded precursor RNA, herein designated VGR FOLDED PRECURSOR RNA. It is appreciated that VGR399 folded precursor RNA, herein designated VGR FOLDED PRECURSOR RNA, comprises a plurality of what is known in the art as hairpin structures. These hairpin structures are due to the fact that the nucleotide sequence of VGR399 precursor RNA comprises a plurality of segments, the first half of each such segment having a nucleotide sequence which is at least a partial inversed-reversed sequence of the second half thereof, as is well known in the art.

[5447] VGR399 folded precursor RNA, herein designated VGR FOLDED PRECURSOR RNA, is naturally processed by cellular enzymatic activity into at least 4 separate VGAM precursor RNAs, VGAM177 precursor RNA, VGAM178 precursor RNA, VGAM179 precursor RNA and VGAM180 precursor RNA, herein schematically represented by VGAM1 PRECURSOR, VGAM2 PRECURSOR, VGAM3 PRECURSOR and VGAM4 PRECURSOR respectively, each of which VGAM precursor RNAs being a hairpin shaped RNA segment, corresponding to VGAM PRECURSOR RNA of FIG. 8.

[5448] The above mentioned VGAM precursor RNAs are diced by DICER COMPLEX of FIG. 8, yielding respective short RNA segments of about 22 nucleotides in length, VGAM177 RNA, VGAM178 RNA, VGAM179 RNA and VGAM180 RNA respectively, herein schematically represented by VGAM1 RNA, VGAM2 RNA, VGAM3 RNA and VGAM4 RNA respectively, each of which VGAM RNAs corresponding to VGAM RNA of FIG. 8.

[5449] VGAM177 RNA, herein schematically represented by VGAM1 binds complimentarily to a host target binding site located in an untranslated region of VGAM177 host target RNA, herein schematically represented by VGAM1 HOST TARGET RNA, which host target binding site corresponds to a host target binding site such as BINDING SITE 1, BINDING SITE II or BINDING SITE III of FIG. 1, thereby inhibiting translation of VGAM177 host target RNA, herein schematically represented by VGAM1 HOST TARGET RNA into VGAM177 host target protein, herein schematically represented by VGAM1 HOST TARGET PROTEIN, both of FIG. 1.

[5450] VGAM178 RNA, herein schematically represented by VGAM2 binds complimentarily to a host target binding site located in an untranslated region of VGAM178 host target RNA, herein schematically represented by VGAM2 HOST TARGET RNA, which host target binding site corresponds to a host target binding site such as BINDING SITE 1, BINDING SITE II or BINDING SITE III of FIG. 1, thereby inhibiting translation of VGAM178 host target RNA, herein schematically represented by VGAM2 HOST TARGET RNA into VGAM178 host target protein, herein schematically represented by VGAM2 HOST TARGET PROTEIN, both of FIG. 1.

[5451] VGAM179 RNA, herein schematically represented by VGAM3 binds complimentarily to a host target binding site located in an untranslated region of VGAM179 host target RNA, herein schematically represented by VGAM3 HOST TARGET RNA, which host target binding site corresponds to a host target binding site such as BINDING SITE I, BINDING SITE II or BINDING SITE III of FIG. 1, thereby inhibiting translation of VGAM179 host target RNA, herein schematically represented by VGAM3 HOST TARGET RNA into VGAM179 host target protein, herein schematically represented by VGAM3 HOST TARGET PROTEIN, both of FIG. 1.

[5452] VGAM180 RNA, herein schematically represented by VGAM4 binds complimentarily to a host target binding site located in an untranslated region of VGAM180 host target RNA, herein schematically represented by VGAM4 HOST TARGET RNA, which host target binding site corresponds to a host target binding site such as BINDING SITE I, BINDING SITE II or BINDING SITE III of FIG. 1, thereby inhibiting translation of VGAM180 host target RNA, herein schematically represented by VGAM4 HOST TARGET RNA into VGAM180 host target protein, herein schematically represented by VGAM4 HOST TARGET PROTEIN, both of FIG. 1.

[5453] It is appreciated that a function of VGR399 gene, herein designated VGR GENE, is inhibition of expression of host target genes, as part of a novel viral mechanism of attacking a host. Accordingly, utilities of VGR399 gene include diagnosis, prevention and treatment of viral infection by. Specific functions, and accordingly utilities, of VGR399 gene, herein designated VGR GENE, correlate with, and may be deduced from, the identity of the host target genes, which are inhibited by VGAM RNAs comprised in the operon-like cluster of VGR399 gene: VGAM177 host target protein, VGAM178 host target protein, VGAM179 host target protein and VGAM180 host target protein, herein schematically represented by VGAM1 HOST TARGET PROTEIN through VGAM HOST TARGET PROTEIN respectively. The function of these host target genes is elaborated hereinabove with reference to VGAM177, VGAM178, VGAM179 and VGAM180

[5454] FIG. 9 further provides a conceptual description of novel bioinformatically detected regulatory viral gene, referred to here as Viral Genomic Record 400(VGR400) viral gene, which encodes an operon-like cluster of novel viral micro RNA-like genes, each of which in turn modulates expression of at least one host target gene, the function and utility of which at least one host target gene is known in the art.

[5455] VGR400 gene, herein designated VGR GENE, is a novel bioinformatically detected regulatory, non protein coding, RNA viral gene. The method by which VGR400 gene was detected is described hereinabove with reference to FIGS. 6-15.

[5456] VGR400 gene encodes VGR400 precursor RNA, herein designated VGR PRECURSOR RNA, an RNA molecule, typically several hundred nucleotides long.

[5457] VGR400 precursor RNA folds spatially, forming VGR400 folded precursor RNA, herein designated VGR FOLDED PRECURSOR RNA. It is appreciated that VGR400 folded precursor RNA, herein designated VGR FOLDED PRECURSOR RNA, comprises a plurality of what is known in the art as hairpin structures. These hairpin structures are due to the fact that the nucleotide sequence of VGR400 precursor RNA comprises a plurality of segments, the first half of each such segment having a nucleotide sequence which is at least a partial inversed-reversed sequence of the second half thereof, as is well known in the art.

[5458] VGR400 folded precursor RNA, herein designated VGR FOLDED PRECURSOR RNA, is naturally processed by cellular enzymatic activity into at least 7 separate VGAM precursor RNAs, VGAM181 precursor RNA, VGAM182 precursor RNA, VGAM183 precursor RNA, VGAM184 precursor RNA, VGAM185 precursor RNA, VGAM186 precursor RNA and VGAM187 precursor RNA, herein schematically represented by VGAM1 PRECURSOR, VGAM2 PRECURSOR, VGAM3 PRECURSOR, VGAM4 PRECURSOR, VGAM5 PRECURSOR, VGAM6 PRECURSOR and VGAM7 PRECURSOR respectively, each of which VGAM precursor RNAs being a hairpin shaped RNA segment, corresponding to VGAM PRECURSOR RNA of FIG. 8.

[5459] The above mentioned VGAM precursor RNAs are diced by DICER COMPLEX of FIG. 8, yielding respective short RNA segments of about 22 nucleotides in length, VGAM181 RNA, VGAM182 RNA, VGAM183 RNA, VGAM184 RNA, VGAM185 RNA, VGAM186 RNA and VGAM187 RNA respectively, herein schematically represented by VGAM1 RNA, VGAM2 RNA, VGAM3 RNA, VGAM4 RNA, VGAM5 RNA, VGAM6 RNA and VGAM7 RNA respectively, each of which VGAM RNAs corresponding to VGAM RNA of FIG. 8.

[5460] VGAM181 RNA, herein schematically represented by VGAM1 binds complimentarily to a host target binding site located in an untranslated region of VGAM181 host target RNA, herein schematically represented by VGAM1 HOST TARGET RNA, which host target binding site corresponds to a host target binding site such as BINDING SITE I, BINDING SITE II or BINDING SITE III of FIG. 1, thereby inhibiting translation of VGAM181 host target RNA, herein schematically represented by VGAM1 HOST TARGET RNA into VGAM181 host target protein, herein schematically represented by VGAM1 HOST TARGET PROTEIN, both of FIG. 1.

[5461] VGAM182 RNA, herein schematically represented by VGAM2 binds complimentarily to a host target binding site located in an untranslated region of VGAM182 host target RNA, herein schematically represented by VGAM2 HOST TARGET RNA, which host target binding site corresponds to a host target binding site such as BINDING SITE I, BINDING SITE II or BINDING SITE III of FIG. 1, thereby inhibiting translation of VGAM182 host target RNA, herein schematically represented by VGAM2 HOST TARGET RNA into VGAM182 host target protein, herein schematically represented by VGAM2 HOST TARGET PROTEIN, both of FIG. 1.

[5462] VGAM183 RNA, herein schematically represented by VGAM3 binds complimentarily to a host target binding site located in an untranslated region of VGAM183 host target RNA, herein schematically represented by VGAM3 HOST TARGET RNA, which host target binding site corresponds to a host target binding site such as BINDING SITE I, BINDING SITE II or BINDING SITE III of FIG. 1, thereby inhibiting translation of VGAM183 host target RNA, herein schematically represented by VGAM3 HOST TARGET RNA into VGAM183 host target protein, herein schematically represented by VGAM3 HOST TARGET PROTEIN, both of FIG. 1.

[5463] VGAM184 RNA, herein schematically represented by VGAM4 binds complimentarily to a host target binding site located in an untranslated region of VGAM184 host target RNA, herein schematically represented by VGAM4 HOST TARGET RNA, which host target binding site corresponds to a host target binding site such as BINDING SITE I, BINDING SITE II or BINDING SITE III of FIG. 1, thereby inhibiting translation of VGAM184 host target RNA, herein schematically represented by VGAM4 HOST TARGET RNA into VGAM184 host target protein, herein schematically represented by VGAM4 HOST TARGET PROTEIN, both of FIG. 1.

[5464] VGAM185 RNA, herein schematically represented by VGAM5 binds complimentarily to a host target binding site located in an untranslated region of VGAM185 host target RNA, herein schematically represented by VGAM5 HOST TARGET RNA, which host target binding site corresponds to a host target binding site such as BINDING SITE I, BINDING SITE II or BINDING SITE III of FIG. 1, thereby inhibiting translation of VGAM185 host target RNA, herein schematically represented by VGAM5 HOST TARGET RNA into VGAM185 host target protein, herein schematically represented by VGAM5 HOST TARGET PROTEIN, both of FIG. 1.

[5465] VGAM186 RNA, herein schematically represented by VGAM6 binds complimentarily to a host target binding site located in an untranslated region of VGAM186 host target RNA, herein schematically represented by VGAM6 HOST TARGET RNA, which host target binding site corresponds to a host target binding site such as BINDING SITE I, BINDING SITE II or BINDING SITE III of FIG. 1, thereby inhibiting translation of VGAM186 host target RNA, herein schematically represented by VGAM6 HOST TARGET RNA into VGAM186 host target protein, herein schematically represented by VGAM6 HOST TARGET PROTEIN, both of FIG. 1.

[5466] VGAM187 RNA, herein schematically represented by VGAM7 binds complimentarily to a host target binding site located in an untranslated region of VGAM187 host target RNA, herein schematically represented by VGAM7 HOST TARGET RNA, which host target binding site corresponds to a host target binding site such as BINDING SITE 1, BINDING SITE II or BINDING SITE III of FIG. 1, thereby inhibiting translation of VGAM187 host target RNA, herein schematically represented by VGAM7 HOST TARGET RNA into VGAM187 host target protein, herein schematically represented by VGAM7 HOST TARGET PROTEIN, both of FIG. 1.

[5467] It is appreciated that a function of VGR400 gene, herein designated VGR GENE, is inhibition of expression of host target genes, as part of a novel viral mechanism of attacking a host. Accordingly, utilities of VGR400 gene include diagnosis, prevention and treatment of viral infection by. Specific functions, and accordingly utilities, of VGR400 gene, herein designated VGR GENE, correlate with, and may be deduced from, the identity of the host target genes, which are inhibited by VGAM RNAs comprised in the operon-like cluster of VGR400 gene: VGAM181 host target protein, VGAM182 host target protein, VGAM183 host target protein, VGAM184 host target protein, VGAM185 host target protein, VGAM186 host target protein and VGAM187 host target protein, herein schematically represented by VGAM1 HOST TARGET PROTEIN through VGAM HOST TARGET PROTEIN respectively. The function of these host target genes is elaborated hereinabove with reference to VGAM181, VGAM182, VGAM183, VGAM184, VGAM185, VGAM186 and VGAM187

[5468] FIG. 9 further provides a conceptual description of novel bioinformatically detected regulatory viral gene, referred to here as Viral Genomic Record 401(VGR401) viral gene, which encodes an operon-like cluster of novel viral micro RNA-like genes, each of which in turn modulates expression of at least one host target gene, the function and utility of which at least one host target gene is known in the art.

[5469] VGR401 gene, herein designated VGR GENE, is a novel bioinformatically detected regulatory, non protein coding, RNA viral gene. The method by which VGR401 gene was detected is described hereinabove with reference to FIGS. 6-15.

[5470] VGR401 gene encodes VGR401 precursor RNA, herein designated VGR PRECURSOR RNA, an RNA molecule, typically several hundred nucleotides long.

[5471] VGR401 precursor RNA folds spatially, forming VGR401 folded precursor RNA, herein designated VGR FOLDED PRECURSOR RNA. It is appreciated that VGR401 folded precursor RNA, herein designated VGR FOLDED PRECURSOR RNA, comprises a plurality of what is known in the art as hairpin structures. These hairpin structures are due to the fact that the nucleotide sequence of VGR401 precursor RNA comprises a plurality of segments, the first half of each such segment having a nucleotide sequence which is at least a partial inversed-reversed sequence of the second half thereof, as is well known in the art.

[5472] VGR401 folded precursor RNA, herein designated VGR FOLDED PRECURSOR RNA, is naturally processed by cellular enzymatic activity into at least 2 separate VGAM precursor RNAs, VGAM188 precursor RNA and VGAM189 precursor RNA, herein schematically represented by VGAM1 PRECURSOR and VGAM2 PRECURSOR respectively, each of which VGAM precursor RNAs being a hairpin shaped RNA segment, corresponding to VGAM PRECURSOR RNA of FIG. 8.

[5473] The above mentioned VGAM precursor RNAs are diced by DICER COMPLEX of FIG. 8, yielding respective short RNA segments of about 22 nucleotides in length, VGAM188 RNA and VGAM189 RNA respectively, herein schematically represented by VGAM1 RNA and VGAM2 RNA respectively, each of which VGAM RNAs corresponding to VGAM RNA of FIG. 8.

[5474] VGAM188 RNA, herein schematically represented by VGAM1 binds complimentarily to a host target binding site located in an untranslated region of VGAM188 host target RNA, herein schematically represented by VGAM1 HOST TARGET RNA, which host target binding site corresponds to a host target binding site such as BINDING SITE I, BINDING SITE II or BINDING SITE III of FIG. 1, thereby inhibiting translation of VGAM188 host target RNA, herein schematically represented by VGAM1 HOST TARGET RNA into VGAM188 host target protein, herein schematically represented by VGAM1 HOST TARGET PROTEIN, both of FIG. 1.

[5475] VGAM189 RNA, herein schematically represented by VGAM2 binds complimentarily to a host target binding site located in an untranslated region of VGAM189 host target RNA, herein schematically represented by VGAM2 HOST TARGET RNA, which host target binding site corresponds to a host target binding site such as BINDING SITE I, BINDING SITE II or BINDING SITE III of FIG. 1, thereby inhibiting translation of VGAM189 host target RNA, herein schematically represented by VGAM2 HOST TARGET RNA into VGAM189 host target protein, herein schematically represented by VGAM2 HOST TARGET PROTEIN, both of FIG. 1.

[5476] It is appreciated that a function of VGR401 gene, herein designated VGR GENE, is inhibition of expression of host target genes, as part of a novel viral mechanism of attacking a host. Accordingly, utilities of VGR401 gene include diagnosis, prevention and treatment of viral infection by. Specific functions, and accordingly utilities, of VGR401 gene, herein designated VGR GENE, correlate with, and may be deduced from, the identity of the host target genes, which are inhibited by VGAM RNAs comprised in the operon-like cluster of VGR401 gene: VGAM188 host target protein and VGAM189 host target protein, herein schematically represented by VGAM1 HOST TARGET PROTEIN and VGAM HOST TARGET PROTEIN respectively. The function of these host target genes is elaborated hereinabove with reference to VGAM188 and VGAM189

[5477] FIG. 9 further provides a conceptual description of novel bioinformatically detected regulatory viral gene, referred to here as Viral Genomic Record 402(VGR402) viral gene, which encodes an operon-like cluster of novel viral micro RNA-like genes, each of which in turn modulates expression of at least one host target gene, the function and utility of which at least one host target gene is known in the art.

[5478] VGR402 gene, herein designated VGR GENE, is a novel bioinformatically detected regulatory, non protein coding, RNA viral gene. The method by which VGR402 gene was detected is described hereinabove with reference to FIGS. 6-15.

[5479] VGR402 gene encodes VGR402 precursor RNA, herein designated VGR PRECURSOR RNA, an RNA molecule, typically several hundred nucleotides long.

[5480] VGR402 precursor RNA folds spatially, forming VGR402 folded precursor RNA, herein designated VGR FOLDED PRECURSOR RNA. It is appreciated that VGR402 folded precursor RNA, herein designated VGR FOLDED PRECURSOR RNA, comprises a plurality of what is known in the art as hairpin structures. These hairpin structures are due to the fact that the nucleotide sequence of VGR402 precursor RNA comprises a plurality of segments, the first half of each such segment having a nucleotide sequence which is at least a partial inversed-reversed sequence of the second half thereof, as is well known in the art.

[5481] VGR402 folded precursor RNA, herein designated VGR FOLDED PRECURSOR RNA, is naturally processed by cellular enzymatic activity into at least 2 separate VGAM precursor RNAs, VGAM193 precursor RNA and VGAM194 precursor RNA, herein schematically represented by VGAM1 PRECURSOR and VGAM2 PRECURSOR respectively, each of which VGAM precursor RNAs being a hairpin shaped RNA segment, corresponding to VGAM PRECURSOR RNA of FIG. 8.

[5482] The above mentioned VGAM precursor RNAs are diced by DICER COMPLEX of FIG. 8, yielding respective short RNA segments of about 22 nucleotides in length, VGAM193 RNA and VGAM194 RNA respectively, herein schematically represented by VGAM1 RNA and VGAM2 RNA respectively, each of which VGAM RNAs corresponding to VGAM RNA of FIG. 8.

[5483] VGAM193 RNA, herein schematically represented by VGAM1 binds complimentarily to a host target binding site located in an untranslated region of VGAM193 host target RNA, herein schematically represented by VGAM1 HOST TARGET RNA, which host target binding site corresponds to a host target binding site such as BINDING SITE I, BINDING SITE II or BINDING SITE III of FIG. 1, thereby inhibiting translation of VGAM193 host target RNA, herein schematically represented by VGAM1 HOST TARGET RNA into VGAM193 host target protein, herein schematically represented by VGAM1 HOST TARGET PROTEIN, both of FIG. 1.

[5484] VGAM194 RNA, herein schematically represented by VGAM2 binds complimentarily to a host target binding site located in an untranslated region of VGAM194 host target RNA, herein schematically represented by VGAM2 HOST TARGET RNA, which host target binding site corresponds to a host target binding site such as BINDING SITE I, BINDING SITE II or BINDING SITE III of FIG. 1, thereby inhibiting translation of VGAM194 host target RNA, herein schematically represented by VGAM2 HOST TARGET RNA into VGAM194 host target protein, herein schematically represented by VGAM2 HOST TARGET PROTEIN, both of FIG. 1.

[5485] It is appreciated that a function of VGR402 gene, herein designated VGR GENE, is inhibition of expression of host target genes, as part of a novel viral mechanism of attacking a host. Accordingly, utilities of VGR402 gene include diagnosis, prevention and treatment of viral infection by. Specific functions, and accordingly utilities, of VGR402 gene, herein designated VGR GENE, correlate with, and may be deduced from, the identity of the host target genes, which are inhibited by VGAM RNAs comprised in the operon-like cluster of VGR402 gene: VGAM193 host target protein and VGAM194 host target protein, herein schematically represented by VGAM1 HOST TARGET PROTEIN and VGAM HOST TARGET PROTEIN respectively. The function of these host target genes is elaborated hereinabove with reference to VGAM193 and VGAM194

[5486] FIG. 9 further provides a conceptual description of novel bioinformatically detected regulatory viral gene, referred to here as Viral Genomic Record 403(VGR403) viral gene, which encodes an operon-like cluster of novel viral micro RNA-like genes, each of which in turn modulates expression of at least one host target gene, the function and utility of which at least one host target gene is known in the art.

[5487] VGR403 gene, herein designated VGR GENE, is a novel bioinformatically detected regulatory, non protein coding, RNA viral gene. The method by which VGR403 gene was detected is described hereinabove with reference to FIGS. 6-15.

[5488] VGR403 gene encodes VGR403 precursor RNA, herein designated VGR PRECURSOR RNA, an RNA molecule, typically several hundred nucleotides long.

[5489] VGR403 precursor RNA folds spatially, forming VGR403 folded precursor RNA, herein designated VGR FOLDED PRECURSOR RNA. It is appreciated that VGR403 folded precursor RNA, herein designated VGR FOLDED PRECURSOR RNA, comprises a plurality of what is known in the art as hairpin structures. These hairpin structures are due to the fact that the nucleotide sequence of VGR403 precursor RNA comprises a plurality of segments, the first half of each such segment having a nucleotide sequence which is at least a partial inversed-reversed sequence of the second half thereof, as is well known in the art.

[5490] VGR403 folded precursor RNA, herein designated VGR FOLDED PRECURSOR RNA, is naturally processed by cellular enzymatic activity into at least 3 separate VGAM precursor RNAs, VGAM195 precursor RNA, VGAM196 precursor RNA and VGAM197 precursor RNA, herein schematically represented by VGAM1 PRECURSOR, VGAM2 PRECURSOR and VGAM3 PRECURSOR respectively, each of which VGAM precursor RNAs being a hairpin shaped RNA segment, corresponding to VGAM PRECURSOR RNA of FIG. 8.

[5491] The above mentioned VGAM precursor RNAs are diced by DICER COMPLEX of FIG. 8, yielding respective short RNA segments of about 22 nucleotides in length, VGAM195 RNA, VGAM196 RNA and VGAM197 RNA respectively, herein schematically represented by VGAM1 RNA, VGAM2 RNA and VGAM3 RNA respectively, each of which VGAM RNAs corresponding to VGAM RNA of FIG. 8.

[5492] VGAM195 RNA, herein schematically represented by VGAM1 binds complimentarily to a host target binding site located in an untranslated region of VGAM195 host target RNA, herein schematically represented by VGAM1 HOST TARGET RNA, which host target binding site corresponds to a host target binding site such as BINDING SITE I, BINDING SITE II or BINDING SITE III of FIG. 1, thereby inhibiting translation of VGAM195 host target RNA, herein schematically represented by VGAM1 HOST TARGET RNA into VGAM195 host target protein, herein schematically represented by VGAM1 HOST TARGET PROTEIN, both of FIG. 1.

[5493] VGAM196 RNA, herein schematically represented by VGAM2 binds complimentarily to a host target binding site located in an untranslated region of VGAM196 host target RNA, herein schematically represented by VGAM2 HOST TARGET RNA, which host target binding site corresponds to a host target binding site such as BINDING SITE I, BINDING SITE II or BINDING SITE III of FIG. 1, thereby inhibiting translation of VGAM196 host target RNA, herein schematically represented by VGAM2 HOST TARGET RNA into VGAM196 host target protein, herein schematically represented by VGAM2 HOST TARGET PROTEIN, both of FIG. 1.

[5494] VGAM197 RNA, herein schematically represented by VGAM3 binds complimentarily to a host target binding site located in an untranslated region of VGAM197 host target RNA, herein schematically represented by VGAM3 HOST TARGET RNA, which host target binding site corresponds to a host target binding site such as BINDING SITE I, BINDING SITE II or BINDING SITE III of FIG. 1, thereby inhibiting translation of VGAM197 host target RNA, herein schematically represented by VGAM3 HOST TARGET RNA into VGAM197 host target protein, herein schematically represented by VGAM3 HOST TARGET PROTEIN, both of FIG. 1.

[5495] It is appreciated that a function of VGR403 gene, herein designated VGR GENE, is inhibition of expression of host target genes, as part of a novel viral mechanism of attacking a host. Accordingly, utilities of VGR403 gene include diagnosis, prevention and treatment of viral infection by. Specific functions, and accordingly utilities, of VGR403 gene, herein designated VGR GENE, correlate with, and may be deduced from, the identity of the host target genes, which are inhibited by VGAM RNAs comprised in the operon-like cluster of VGR403 gene: VGAM195 host target protein, VGAM196 host target protein and VGAM197 host target protein, herein schematically represented by VGAM1 HOST TARGET PROTEIN through VGAM HOST TARGET PROTEIN respectively. The function of these host target genes is elaborated hereinabove with reference to VGAM195, VGAM196 and VGAM197

[5496] FIG. 9 further provides a conceptual description of novel bioinformatically detected regulatory viral gene, referred to here as Viral Genomic Record 404(VGR404) viral gene, which encodes an operon-like cluster of novel viral micro RNA-like genes, each of which in turn modulates expression of at least one host target gene, the function and utility of which at least one host target gene is known in the art.

[5497] VGR404 gene, herein designated VGR GENE, is a novel bioinformatically detected regulatory, non protein coding, RNA viral gene. The method by which VGR404 gene was detected is described hereinabove with reference to FIGS. 6-15.

[5498] VGR404 gene encodes VGR404 precursor RNA, herein designated VGR PRECURSOR RNA, an RNA molecule, typically several hundred nucleotides long.

[5499] VGR404 precursor RNA folds spatially, forming VGR404 folded precursor RNA, herein designated VGR FOLDED PRECURSOR RNA. It is appreciated that VGR404 folded precursor RNA, herein designated VGR FOLDED PRECURSOR RNA, comprises a plurality of what is known in the art as hairpin structures. These hairpin structures are due to the fact that the nucleotide sequence of VGR404 precursor RNA comprises a plurality of segments, the first half of each such segment having a nucleotide sequence which is at least a partial inversed-reversed sequence of the second half thereof, as is well known in the art.

[5500] VGR404 folded precursor RNA, herein designated VGR FOLDED PRECURSOR RNA, is naturally processed by cellular enzymatic activity into at least 3 separate VGAM precursor RNAs, VGAM198 precursor RNA, VGAM199 precursor RNA and VGAM200 precursor RNA, herein schematically represented by VGAM1 PRECURSOR, VGAM2 PRECURSOR and VGAM3 PRECURSOR respectively, each of which VGAM precursor RNAs being a hairpin shaped RNA segment, corresponding to VGAM PRECURSOR RNA of FIG. 8.

[5501] The above mentioned VGAM precursor RNAs are diced by DICER COMPLEX of FIG. 8, yielding respective short RNA segments of about 22 nucleotides in length, VGAM198 RNA, VGAM199 RNA and VGAM200 RNA respectively, herein schematically represented by VGAM1 RNA, VGAM2 RNA and VGAM3 RNA respectively, each of which VGAM RNAs corresponding to VGAM RNA of FIG. 8.

[5502] VGAM198 RNA, herein schematically represented by VGAM1 binds complimentarily to a host target binding site located in an untranslated region of VGAM198 host target RNA, herein schematically represented by VGAM1 HOST TARGET RNA, which host target binding site corresponds to a host target binding site such as BINDING SITE 1, BINDING SITE II or BINDING SITE III of FIG. 1, thereby inhibiting translation of VGAM198 host target RNA, herein schematically represented by VGAM1 HOST TARGET RNA into VGAM198 host target protein, herein schematically represented by VGAM1 HOST TARGET PROTEIN, both of FIG. 1.

[5503] VGAM199 RNA, herein schematically represented by VGAM2 binds complimentarily to a host target binding site located in an untranslated region of VGAM199 host target RNA, herein schematically represented by VGAM2 HOST TARGET RNA, which host target binding site corresponds to a host target binding site such as BINDING SITE 1, BINDING SITE II or BINDING SITE III of FIG. 1, thereby inhibiting translation of VGAM199 host target RNA, herein schematically represented by VGAM2 HOST TARGET RNA into VGAM199 host target protein, herein schematically represented by VGAM2 HOST TARGET PROTEIN, both of FIG. 1.

[5504] VGAM200 RNA, herein schematically represented by VGAM3 binds complimentarily to a host target binding site located in an untranslated region of VGAM200 host target RNA, herein schematically represented by VGAM3 HOST TARGET RNA, which host target binding site corresponds to a host target binding site such as BINDING SITE 1, BINDING SITE II or BINDING SITE III of FIG. 1, thereby inhibiting translation of VGAM200 host target RNA, herein schematically represented by VGAM3 HOST TARGET RNA into VGAM200 host target protein, herein schematically represented by VGAM3 HOST TARGET PROTEIN, both of FIG. 1.

[5505] It is appreciated that a function of VGR404 gene, herein designated VGR GENE, is inhibition of expression of host target genes, as part of a novel viral mechanism of attacking a host. Accordingly, utilities of VGR404 gene include diagnosis, prevention and treatment of viral infection by. Specific functions, and accordingly utilities, of VGR404 gene, herein designated VGR GENE, correlate with, and may be deduced from, the identity of the host target genes, which are inhibited by VGAM RNAs comprised in the operon-like cluster of VGR404 gene: VGAM198 host target protein, VGAM199 host target protein and VGAM200 host target protein, herein schematically represented by VGAM1 HOST TARGET PROTEIN through VGAM HOST TARGET PROTEIN respectively. The function of these host target genes is elaborated hereinabove with reference to VGAM198, VGAM199 and VGAM200

[5506] FIG. 9 further provides a conceptual description of novel bioinformatically detected regulatory viral gene, referred to here as Viral Genomic Record 405(VGR405) viral gene, which encodes an operon-like cluster of novel viral micro RNA-like genes, each of which in turn modulates expression of at least one host target gene, the function and utility of which at least one host target gene is known in the art.

[5507] VGR405 gene, herein designated VGR GENE, is a novel bioinformatically detected regulatory, non protein coding, RNA viral gene. The method by which VGR405 gene was detected is described hereinabove with reference to FIGS. 6-15.

[5508] VGR405 gene encodes VGR405 precursor RNA, herein designated VGR PRECURSOR RNA, an RNA molecule, typically several hundred nucleotides long.

[5509] VGR405 precursor RNA folds spatially, forming VGR405 folded precursor RNA, herein designated VGR FOLDED PRECURSOR RNA. It is appreciated that VGR405 folded precursor RNA, herein designated VGR FOLDED PRECURSOR RNA, comprises a plurality of what is known in the art as hairpin structures. These hairpin structures are due to the fact that the nucleotide sequence of VGR405 precursor RNA comprises a plurality of segments, the first half of each such segment having a nucleotide sequence which is at least a partial inversed-reversed sequence of the second half thereof, as is well known in the art.

[5510] VGR405 folded precursor RNA, herein designated VGR FOLDED PRECURSOR RNA, is naturally processed by cellular enzymatic activity into at least 2 separate VGAM precursor RNAs, VGAM201 precursor RNA and VGAM202 precursor RNA, herein schematically represented by VGAM1 PRECURSOR and VGAM2 PRECURSOR respectively, each of which VGAM precursor RNAs being a hairpin shaped RNA segment, corresponding to VGAM PRECURSOR RNA of FIG. 8.

[5511] The above mentioned VGAM precursor RNAs are diced by DICER COMPLEX of FIG. 8, yielding respective short RNA segments of about 22 nucleotides in length, VGAM201 RNA and VGAM202 RNA respectively, herein schematically represented by VGAM1 RNA and VGAM2 RNA respectively, each of which VGAM RNAs corresponding to VGAM RNA of FIG. 8.

[5512] VGAM201 RNA, herein schematically represented by VGAM1 binds complimentarily to a host target binding site located in an untranslated region of VGAM201 host target RNA, herein schematically represented by VGAM1 HOST TARGET RNA, which host target binding site corresponds to a host target binding site such as BINDING SITE I, BINDING SITE II or BINDING SITE III of FIG. 1, thereby inhibiting translation of VGAM201 host target RNA, herein schematically represented by VGAM1 HOST TARGET RNA into VGAM201 host target protein, herein schematically represented by VGAM1 HOST TARGET PROTEIN, both of FIG. 1.

[5513] VGAM202 RNA, herein schematically represented by VGAM2 binds complimentarily to a host target binding site located in an untranslated region of VGAM202 host target RNA, herein schematically represented by VGAM2 HOST TARGET RNA, which host target binding site corresponds to a host target binding site such as BINDING SITE I, BINDING SITE II or BINDING SITE III of FIG. 1, thereby inhibiting translation of VGAM202 host target RNA, herein schematically represented by VGAM2 HOST TARGET RNA into VGAM202 host target protein, herein schematically represented by VGAM2 HOST TARGET PROTEIN, both of FIG. 1.

[5514] It is appreciated that a function of VGR405 gene, herein designated VGR GENE, is inhibition of expression of host target genes, as part of a novel viral mechanism of attacking a host. Accordingly, utilities of VGR405 gene include diagnosis, prevention and treatment of viral infection by. Specific functions, and accordingly utilities, of VGR405 gene, herein designated VGR GENE, correlate with, and may be deduced from, the identity of the host target genes, which are inhibited by VGAM RNAs comprised in the operon-like cluster of VGR405 gene: VGAM201 host target protein and VGAM202 host target protein, herein schematically represented by VGAM1 HOST TARGET PROTEIN and VGAM HOST TARGET PROTEIN respectively. The function of these host target genes is elaborated hereinabove with reference to VGAM201 and VGAM202

[5515] FIG. 9 further provides a conceptual description of novel bioinformatically detected regulatory viral gene, referred to here as Viral Genomic Record 406(VGR406) viral gene, which encodes an operon-like cluster of novel viral micro RNA-like genes, each of which in turn modulates expression of at least one host target gene, the function and utility of which at least one host target gene is known in the art.

[5516] VGR406 gene, herein designated VGR GENE, is a novel bioinformatically detected regulatory, non protein coding, RNA viral gene. The method by which VGR406 gene was detected is described hereinabove with reference to FIGS. 6-15.

[5517] VGR406 gene encodes VGR406 precursor RNA, herein designated VGR PRECURSOR RNA, an RNA molecule, typically several hundred nucleotides long.

[5518] VGR406 precursor RNA folds spatially, forming VGR406 folded precursor RNA, herein designated VGR FOLDED PRECURSOR RNA. It is appreciated that VGR406 folded precursor RNA, herein designated VGR FOLDED PRECURSOR RNA, comprises a plurality of what is known in the art as hairpin structures. These hairpin structures are due to the fact that the nucleotide sequence of VGR406 precursor RNA comprises a plurality of segments, the first half of each such segment having a nucleotide sequence which is at least a partial inversed-reversed sequence of the second half thereof, as is well known in the art.

[5519] VGR406 folded precursor RNA, herein designated VGR FOLDED PRECURSOR RNA, is naturally processed by cellular enzymatic activity into at least 3 separate VGAM precursor RNAs, VGAM203 precursor RNA, VGAM204 precursor RNA and VGAM205 precursor RNA, herein schematically represented by VGAM1 PRECURSOR, VGAM2 PRECURSOR and VGAM3 PRECURSOR respectively, each of which VGAM precursor RNAs being a hairpin shaped RNA segment, corresponding to VGAM PRECURSOR RNA of FIG. 8.

[5520] The above mentioned VGAM precursor RNAs are diced by DICER COMPLEX of FIG. 8, yielding respective short RNA segments of about 22 nucleotides in length, VGAM203 RNA, VGAM204 RNA and VGAM205 RNA respectively, herein schematically represented by VGAM1 RNA, VGAM2 RNA and VGAM3 RNA respectively, each of which VGAM RNAs corresponding to VGAM RNA of FIG. 8.

[5521] VGAM203 RNA, herein schematically represented by VGAM1 binds complimentarily to a host target binding site located in an untranslated region of VGAM203 host target RNA, herein schematically represented by VGAM1 HOST TARGET RNA, which host target binding site corresponds to a host target binding site such as BINDING SITE 1, BINDING SITE II or BINDING SITE III of FIG. 1, thereby inhibiting translation of VGAM203 host target RNA, herein schematically represented by VGAM1 HOST TARGET RNA into VGAM203 host target protein, herein schematically represented by VGAM1 HOST TARGET PROTEIN, both of FIG. 1.

[5522] VGAM204 RNA, herein schematically represented by VGAM2 binds complimentarily to a host target binding site located in an untranslated region of VGAM204 host target RNA, herein schematically represented by VGAM2 HOST TARGET RNA, which host target binding site corresponds to a host target binding site such as BINDING SITE 1, BINDING SITE II or BINDING SITE III of FIG. 1, thereby inhibiting translation of VGAM204 host target RNA, herein schematically represented by VGAM2 HOST TARGET RNA into VGAM204 host target protein, herein schematically represented by VGAM2 HOST TARGET PROTEIN, both of FIG. 1.

[5523] VGAM205 RNA, herein schematically represented by VGAM3 binds complimentarily to a host target binding site located in an untranslated region of VGAM205 host target RNA, herein schematically represented by VGAM3 HOST TARGET RNA, which host target binding site corresponds to a host target binding site such as BINDING SITE 1, BINDING SITE II or BINDING SITE III of FIG. 1, thereby inhibiting translation of VGAM205 host target RNA, herein schematically represented by VGAM3 HOST TARGET RNA into VGAM205 host target protein, herein schematically represented by VGAM3 HOST TARGET PROTEIN, both of FIG. 1.

[5524] It is appreciated that a function of VGR406 gene, herein designated VGR GENE, is inhibition of expression of host target genes, as part of a novel viral mechanism of attacking a host. Accordingly, utilities of VGR406 gene include diagnosis, prevention and treatment of viral infection by. Specific functions, and accordingly utilities, of VGR406 gene, herein designated VGR GENE, correlate with, and may be deduced from, the identity of the host target genes, which are inhibited by VGAM RNAs comprised in the operon-like cluster of VGR406 gene: VGAM203 host target protein, VGAM204 host target protein and VGAM205 host target protein, herein schematically represented by VGAM1 HOST TARGET PROTEIN through VGAM HOST TARGET PROTEIN respectively. The function of these host target genes is elaborated hereinabove with reference to VGAM203, VGAM204 and VGAM205

[5525] FIG. 9 further provides a conceptual description of novel bioinformatically detected regulatory viral gene, referred to here as Viral Genomic Record 407(VGR407) viral gene, which encodes an operon-like cluster of novel viral micro RNA-like genes, each of which in turn modulates expression of at least one host target gene, the function and utility of which at least one host target gene is known in the art.

[5526] VGR407 gene, herein designated VGR GENE, is a novel bioinformatically detected regulatory, non protein coding, RNA viral gene. The method by which VGR407 gene was detected is described hereinabove with reference to FIGS. 6-15.

[5527] VGR407 gene encodes VGR407 precursor RNA, herein designated VGR PRECURSOR RNA, an RNA molecule, typically several hundred nucleotides long.

[5528] VGR407 precursor RNA folds spatially, forming VGR407 folded precursor RNA, herein designated VGR FOLDED PRECURSOR RNA. It is appreciated that VGR407 folded precursor RNA, herein designated VGR FOLDED PRECURSOR RNA, comprises a plurality of what is known in the art as hairpin structures. These hairpin structures are due to the fact that the nucleotide sequence of VGR407 precursor RNA comprises a plurality of segments, the first half of each such segment having a nucleotide sequence which is at least a partial inversed-reversed sequence of the second half thereof, as is well known in the art.

[5529] VGR407 folded precursor RNA, herein designated VGR FOLDED PRECURSOR RNA, is naturally processed by cellular enzymatic activity into at least 4 separate VGAM precursor RNAs, VGAM206 precursor RNA, VGAM207 precursor RNA, VGAM208 precursor RNA and VGAM209 precursor RNA, herein schematically represented by VGAM1 PRECURSOR, VGAM2 PRECURSOR, VGAM3 PRECURSOR and VGAM4 PRECURSOR respectively, each of which VGAM precursor RNAs being a hairpin shaped RNA segment, corresponding to VGAM PRECURSOR RNA of FIG. 8.

[5530] The above mentioned VGAM precursor RNAs are diced by DICER COMPLEX of FIG. 8, yielding respective short RNA segments of about 22 nucleotides in length, VGAM206 RNA, VGAM207 RNA, VGAM208 RNA and VGAM209 RNA respectively, herein schematically represented by VGAM1 RNA, VGAM2 RNA, VGAM3 RNA and VGAM4 RNA respectively, each of which VGAM RNAs corresponding to VGAM RNA of FIG. 8.

[5531] VGAM206 RNA, herein schematically represented by VGAM1 binds complimentarily to a host target binding site located in an untranslated region of VGAM206 host target RNA, herein schematically represented by VGAM1 HOST TARGET RNA, which host target binding site corresponds to a host target binding site such as BINDING SITE 1, BINDING SITE II or BINDING SITE III of FIG. 1, thereby inhibiting translation of VGAM206 host target RNA, herein schematically represented by VGAM1 HOST TARGET RNA into VGAM206 host target protein, herein schematically represented by VGAM1 HOST TARGET PROTEIN, both of FIG. 1.

[5532] VGAM207 RNA, herein schematically represented by VGAM2 binds complimentarily to a host target binding site located in an untranslated region of VGAM207 host target RNA, herein schematically represented by VGAM2 HOST TARGET RNA, which host target binding site corresponds to a host target binding site such as BINDING SITE I, BINDING SITE II or BINDING SITE III of FIG. 1, thereby inhibiting translation of VGAM207 host target RNA, herein schematically represented by VGAM2 HOST TARGET RNA into VGAM207 host target protein, herein schematically represented by VGAM2 HOST TARGET PROTEIN, both of FIG. 1.

[5533] VGAM208 RNA, herein schematically represented by VGAM3 binds complimentarily to a host target binding site located in an untranslated region of VGAM208 host target RNA, herein schematically represented by VGAM3 HOST TARGET RNA, which host target binding site corresponds to a host target binding site such as BINDING SITE I, BINDING SITE II or BINDING SITE III of FIG. 1, thereby inhibiting translation of VGAM208 host target RNA, herein schematically represented by VGAM3 HOST TARGET RNA into VGAM208 host target protein, herein schematically represented by VGAM3 HOST TARGET PROTEIN, both of FIG. 1.

[5534] VGAM209 RNA, herein schematically represented by VGAM4 binds complimentarily to a host target binding site located in an untranslated region of VGAM209 host target RNA, herein schematically represented by VGAM4 HOST TARGET RNA, which host target binding site corresponds to a host target binding site such as BINDING SITE 1, BINDING SITE II or BINDING SITE III of FIG. 1, thereby inhibiting translation of VGAM209 host target RNA, herein schematically represented by VGAM4 HOST TARGET RNA into VGAM209 host target protein, herein schematically represented by VGAM4 HOST TARGET PROTEIN, both of FIG. 1.

[5535] It is appreciated that a function of VGR407 gene, herein designated VGR GENE, is inhibition of expression of host target genes, as part of a novel viral mechanism of attacking a host. Accordingly, utilities of VGR407 gene include diagnosis, prevention and treatment of viral infection by. Specific functions, and accordingly utilities, of VGR407 gene, herein designated VGR GENE, correlate with, and may be deduced from, the identity of the host target genes, which are inhibited by VGAM RNAs comprised in the operon-like cluster of VGR407 gene: VGAM206 host target protein, VGAM207 host target protein, VGAM208 host target protein and VGAM209 host target protein, herein schematically represented by VGAM1 HOST TARGET PROTEIN through VGAM HOST TARGET PROTEIN respectively. The function of these host target genes is elaborated hereinabove with reference to VGAM206, VGAM207, VGAM208 and VGAM209

[5536] FIG. 9 further provides a conceptual description of novel bioinformatically detected regulatory viral gene, referred to here as Viral Genomic Record 408(VGR408) viral gene, which encodes an operon-like cluster of novel viral micro RNA-like genes, each of which in turn modulates expression of at least one host target gene, the function and utility of which at least one host target gene is known in the art.

[5537] VGR408 gene, herein designated VGR GENE, is a novel bioinformatically detected regulatory, non protein coding, RNA viral gene. The method by which VGR408 gene was detected is described hereinabove with reference to FIGS. 6-15.

[5538] VGR408 gene encodes VGR408 precursor RNA, herein designated VGR PRECURSOR RNA, an RNA molecule, typically several hundred nucleotides long.

[5539] VGR408 precursor RNA folds spatially, forming VGR408 folded precursor RNA, herein designated VGR FOLDED PRECURSOR RNA. It is appreciated that VGR408 folded precursor RNA, herein designated VGR FOLDED PRECURSOR RNA, comprises a plurality of what is known in the art as hairpin structures. These hairpin structures are due to the fact that the nucleotide sequence of VGR408 precursor RNA comprises a plurality of segments, the first half of each such segment having a nucleotide sequence which is at least a partial inversed-reversed sequence of the second half thereof, as is well known in the art.

[5540] VGR408 folded precursor RNA, herein designated VGR FOLDED PRECURSOR RNA, is naturally processed by cellular enzymatic activity into at least 4 separate VGAM precursor RNAs, VGAM210 precursor RNA, VGAM211 precursor RNA, VGAM212 precursor RNA and VGAM213 precursor RNA, herein schematically represented by VGAM1 PRECURSOR, VGAM2 PRECURSOR, VGAM3 PRECURSOR and VGAM4 PRECURSOR respectively, each of which VGAM precursor RNAs being a hairpin shaped RNA segment, corresponding to VGAM PRECURSOR RNA of FIG. 8.

[5541] The above mentioned VGAM precursor RNAs are diced by DICER COMPLEX of FIG. 8, yielding respective short RNA segments of about 22 nucleotides in length, VGAM210 RNA, VGAM211 RNA, VGAM212 RNA and VGAM213 RNA respectively, herein schematically represented by VGAM1 RNA, VGAM2 RNA, VGAM3 RNA and VGAM4 RNA respectively, each of which VGAM RNAs corresponding to VGAM RNA of FIG. 8.

[5542] VGAM210 RNA, herein schematically represented by VGAM1 binds complimentarily to a host target binding site located in an untranslated region of VGAM210 host target RNA, herein schematically represented by VGAM1 HOST TARGET RNA, which host target binding site corresponds to a host target binding site such as BINDING SITE I, BINDING SITE II or BINDING SITE III of FIG. 1, thereby inhibiting translation of VGAM210 host target RNA, herein schematically represented by VGAM1 HOST TARGET RNA into VGAM210 host target protein, herein schematically represented by VGAM1 HOST TARGET PROTEIN, both of FIG. 1.

[5543] VGAM211 RNA, herein schematically represented by VGAM2 binds complimentarily to a host target binding site located in an untranslated region of VGAM211 host target RNA, herein schematically represented by VGAM2 HOST TARGET RNA, which host target binding site corresponds to a host target binding site such as BINDING SITE I, BINDING SITE II or BINDING SITE III of FIG. 1, thereby inhibiting translation of VGAM211 host target RNA, herein schematically represented by VGAM2 HOST TARGET RNA into VGAM211 host target protein, herein schematically represented by VGAM2 HOST TARGET PROTEIN, both of FIG. 1.

[5544] VGAM212 RNA, herein schematically represented by VGAM3 binds complimentarily to a host target binding site located in an untranslated region of VGAM212 host target RNA, herein schematically represented by VGAM3 HOST TARGET RNA, which host target binding site corresponds to a host target binding site such as BINDING SITE I, BINDING SITE II or BINDING SITE III of FIG. 1, thereby inhibiting translation of VGAM212 host target RNA, herein schematically represented by VGAM3 HOST TARGET RNA into VGAM212 host target protein, herein schematically represented by VGAM3 HOST TARGET PROTEIN, both of FIG. 1.

[5545] VGAM213 RNA, herein schematically represented by VGAM4 binds complimentarily to a host target binding site located in an untranslated region of VGAM213 host target RNA, herein schematically represented by VGAM4 HOST TARGET RNA, which host target binding site corresponds to a host target binding site such as BINDING SITE I, BINDING SITE II or BINDING SITE III of FIG. 1, thereby inhibiting translation of VGAM213 host target RNA, herein schematically represented by VGAM4 HOST TARGET RNA into VGAM213 host target protein, herein schematically represented by VGAM4 HOST TARGET PROTEIN, both of FIG. 1.

[5546] It is appreciated that a function of VGR408 gene, herein designated VGR GENE, is inhibition of expression of host target genes, as part of a novel viral mechanism of attacking a host. Accordingly, utilities of VGR408 gene include diagnosis, prevention and treatment of viral infection by. Specific functions, and accordingly utilities, of VGR408 gene, herein designated VGR GENE, correlate with, and may be deduced from, the identity of the host target genes, which are inhibited by VGAM RNAs comprised in the operon-like cluster of VGR408 gene: VGAM210 host target protein, VGAM211 host target protein, VGAM212 host target protein and VGAM213 host target protein, herein schematically represented by VGAM1 HOST TARGET PROTEIN through VGAM HOST TARGET PROTEIN respectively. The function of these host target genes is elaborated hereinabove with reference to VGAM210, VGAM211, VGAM212 and VGAM213

[5547] FIG. 9 further provides a conceptual description of novel bioinformatically detected regulatory viral gene, referred to here as Viral Genomic Record 409(VGR409) viral gene, which encodes an operon-like cluster of novel viral micro RNA-like genes, each of which in turn modulates expression of at least one host target gene, the function and utility of which at least one host target gene is known in the art.

[5548] VGR409 gene, herein designated VGR GENE, is a novel bioinformatically detected regulatory, non protein coding, RNA viral gene. The method by which VGR409 gene was detected is described hereinabove with reference to FIGS. 6-15.

[5549] VGR409 gene encodes VGR409 precursor RNA, herein designated VGR PRECURSOR RNA, an RNA molecule, typically several hundred nucleotides long.

[5550] VGR409 precursor RNA folds spatially, forming VGR409 folded precursor RNA, herein designated VGR FOLDED PRECURSOR RNA. It is appreciated that VGR409 folded precursor RNA, herein designated VGR FOLDED PRECURSOR RNA, comprises a plurality of what is known in the art as hairpin structures. These hairpin structures are due to the fact that the nucleotide sequence of VGR409 precursor RNA comprises a plurality of segments, the first half of each such segment having a nucleotide sequence which is at least a partial inversed-reversed sequence of the second half thereof, as is well known in the art.

[5551] VGR409 folded precursor RNA, herein designated VGR FOLDED PRECURSOR RNA, is naturally processed by cellular enzymatic activity into at least 4 separate VGAM precursor RNAs, VGAM214 precursor RNA, VGAM215 precursor RNA, VGAM216 precursor RNA and VGAM217 precursor RNA, herein schematically represented by VGAM1 PRECURSOR, VGAM2 PRECURSOR, VGAM3 PRECURSOR and VGAM4 PRECURSOR respectively, each of which VGAM precursor RNAs being a hairpin shaped RNA segment, corresponding to VGAM PRECURSOR RNA of FIG. 8.

[5552] The above mentioned VGAM precursor RNAs are diced by DICER COMPLEX of FIG. 8, yielding respective short RNA segments of about 22 nucleotides in length, VGAM214 RNA, VGAM215 RNA, VGAM216 RNA and VGAM217 RNA respectively, herein schematically represented by VGAM1 RNA, VGAM2 RNA, VGAM3 RNA and VGAM4 RNA respectively, each of which VGAM RNAs corresponding to VGAM RNA of FIG. 8.

[5553] VGAM214 RNA, herein schematically represented by VGAM1 binds complimentarily to a host target binding site located in an untranslated region of VGAM214 host target RNA, herein schematically represented by VGAM1 HOST TARGET RNA, which host target binding site corresponds to a host target binding site such as BINDING SITE I, BINDING SITE II or BINDING SITE III of FIG. 1, thereby inhibiting translation of VGAM214 host target RNA, herein schematically represented by VGAM1 HOST TARGET RNA into VGAM214 host target protein, herein schematically represented by VGAM1 HOST TARGET PROTEIN, both of FIG. 1.

[5554] VGAM215 RNA, herein schematically represented by VGAM2 binds complimentarily to a host target binding site located in an untranslated region of VGAM215 host target RNA, herein schematically represented by VGAM2 HOST TARGET RNA, which host target binding site corresponds to a host target binding site such as BINDING SITE I, BINDING SITE II or BINDING SITE III of FIG. 1, thereby inhibiting translation of VGAM215 host target RNA, herein schematically represented by VGAM2 HOST TARGET RNA into VGAM215 host target protein, herein schematically represented by VGAM2 HOST TARGET PROTEIN, both of FIG. 1.

[5555] VGAM216 RNA, herein schematically represented by VGAM3 binds complimentarily to a host target binding site located in an untranslated region of VGAM216 host target RNA, herein schematically represented by VGAM3 HOST TARGET RNA, which host target binding site corresponds to a host target binding site such as BINDING SITE I, BINDING SITE II or BINDING SITE III of FIG. 1, thereby inhibiting translation of VGAM216 host target RNA, herein schematically represented by VGAM3 HOST TARGET RNA into VGAM216 host target protein, herein schematically represented by VGAM3 HOST TARGET PROTEIN, both of FIG. 1.

[5556] VGAM217 RNA, herein schematically represented by VGAM4 binds complimentarily to a host target binding site located in an untranslated region of VGAM217 host target RNA, herein schematically represented by VGAM4 HOST TARGET RNA, which host target binding site corresponds to a host target binding site such as BINDING SITE I, BINDING SITE II or BINDING SITE III of FIG. 1, thereby inhibiting translation of VGAM217 host target RNA, herein schematically represented by VGAM4 HOST TARGET RNA into VGAM217 host target protein, herein schematically represented by VGAM4 HOST TARGET PROTEIN, both of FIG. 1.

[5557] It is appreciated that a function of VGR409 gene, herein designated VGR GENE, is inhibition of expression of host target genes, as part of a novel viral mechanism of attacking a host. Accordingly, utilities of VGR409 gene include diagnosis, prevention and treatment of viral infection by. Specific functions, and accordingly utilities, of VGR409 gene, herein designated VGR GENE, correlate with, and may be deduced from, the identity of the host target genes, which are inhibited by VGAM RNAs comprised in the operon-like cluster of VGR409 gene: VGAM214 host target protein, VGAM215 host target protein, VGAM216 host target protein and VGAM217 host target protein, herein schematically represented by VGAM1 HOST TARGET PROTEIN through VGAM HOST TARGET PROTEIN respectively. The function of these host target genes is elaborated hereinabove with reference to VGAM214, VGAM215, VGAM216 and VGAM217

[5558] FIG. 9 further provides a conceptual description of novel bioinformatically detected regulatory viral gene, referred to here as Viral Genomic Record 410(VGR410) viral gene, which encodes an operon-like cluster of novel viral micro RNA-like genes, each of which in turn modulates expression of at least one host target gene, the function and utility of which at least one host target gene is known in the art.

[5559] VGR410 gene, herein designated VGR GENE, is a novel bioinformatically detected regulatory, non protein coding, RNA viral gene. The method by which VGR410 gene was detected is described hereinabove with reference to FIGS. 6-15.

[5560] VGR410 gene encodes VGR410 precursor RNA, herein designated VGR PRECURSOR RNA, an RNA molecule, typically several hundred nucleotides long.

[5561] VGR410 precursor RNA folds spatially, forming VGR410 folded precursor RNA, herein designated VGR FOLDED PRECURSOR RNA. It is appreciated that VGR410 folded precursor RNA, herein designated VGR FOLDED PRECURSOR RNA, comprises a plurality of what is known in the art as hairpin structures. These hairpin structures are due to the fact that the nucleotide sequence of VGR410 precursor RNA comprises a plurality of segments, the first half of each such segment having a nucleotide sequence which is at least a partial inversed-reversed sequence of the second half thereof, as is well known in the art.

[5562] VGR410 folded precursor RNA, herein designated VGR FOLDED PRECURSOR RNA, is naturally processed by cellular enzymatic activity into at least 3 separate VGAM precursor RNAs, VGAM219 precursor RNA, VGAM220 precursor RNA and VGAM221 precursor RNA, herein schematically represented by VGAM1 PRECURSOR, VGAM2 PRECURSOR and VGAM3 PRECURSOR respectively, each of which VGAM precursor RNAs being a hairpin shaped RNA segment, corresponding to VGAM PRECURSOR RNA of FIG. 8.

[5563] The above mentioned VGAM precursor RNAs are diced by DICER COMPLEX of FIG. 8, yielding respective short RNA segments of about 22 nucleotides in length, VGAM219 RNA, VGAM220 RNA and VGAM221 RNA respectively, herein schematically represented by VGAM1 RNA, VGAM2 RNA and VGAM3 RNA respectively, each of which VGAM RNAs corresponding to VGAM RNA of FIG. 8.

[5564] VGAM219 RNA, herein schematically represented by VGAM1 binds complimentarily to a host target binding site located in an untranslated region of VGAM219 host target RNA, herein schematically represented by VGAM1 HOST TARGET RNA, which host target binding site corresponds to a host target binding site such as BINDING SITE I, BINDING SITE II or BINDING SITE III of FIG. 1, thereby inhibiting translation of VGAM219 host target RNA, herein schematically represented by VGAM1 HOST TARGET RNA into VGAM219 host target protein, herein schematically represented by VGAM1 HOST TARGET PROTEIN, both of FIG. 1.

[5565] VGAM220 RNA, herein schematically represented by VGAM2 binds complimentarily to a host target binding site located in an untranslated region of VGAM220 host target RNA, herein schematically represented by VGAM2 HOST TARGET RNA, which host target binding site corresponds to a host target binding site such as BINDING SITE I, BINDING SITE II or BINDING SITE III of FIG. 1, thereby inhibiting translation of VGAM220 host target RNA, herein schematically represented by VGAM2 HOST TARGET RNA into VGAM220 host target protein, herein schematically represented by VGAM2 HOST TARGET PROTEIN, both of FIG. 1.

[5566] VGAM221 RNA, herein schematically represented by VGAM3 binds complimentarily to a host target binding site located in an untranslated region of VGAM221 host target RNA, herein schematically represented by VGAM3 HOST TARGET RNA, which host target binding site corresponds to a host target binding site such as BINDING SITE I, BINDING SITE II or BINDING SITE III of FIG. 1, thereby inhibiting translation of VGAM221 host target RNA, herein schematically represented by VGAM3 HOST TARGET RNA into VGAM221 host target protein, herein schematically represented by VGAM3 HOST TARGET PROTEIN, both of FIG. 1.

[5567] It is appreciated that a function of VGR410 gene, herein designated VGR GENE, is inhibition of expression of host target genes, as part of a novel viral mechanism of attacking a host. Accordingly, utilities of VGR410 gene include diagnosis, prevention and treatment of viral infection by. Specific functions, and accordingly utilities, of VGR410 gene, herein designated VGR GENE, correlate with, and may be deduced from, the identity of the host target genes, which are inhibited by VGAM RNAs comprised in the operon-like cluster of VGR410 gene: VGAM219 host target protein, VGAM220 host target protein and VGAM221 host target protein, herein schematically represented by VGAM1 HOST TARGET PROTEIN through VGAM HOST TARGET PROTEIN respectively. The function of these host target genes is elaborated hereinabove with reference to VGAM219, VGAM220 and VGAM221

[5568] FIG. 9 further provides a conceptual description of novel bioinformatically detected regulatory viral gene, referred to here as Viral Genomic Record 411(VGR411) viral gene, which encodes an operon-like cluster of novel viral micro RNA-like genes, each of which in turn modulates expression of at least one host target gene, the function and utility of which at least one host target gene is known in the art.

[5569] VGR411 gene, herein designated VGR GENE, is a novel bioinformatically detected regulatory, non protein coding, RNA viral gene. The method by which VGR411 gene was detected is described hereinabove with reference to FIGS. 6-15.

[5570] VGR411 gene encodes VGR411 precursor RNA, herein designated VGR PRECURSOR RNA, an RNA molecule, typically several hundred nucleotides long.

[5571] VGR411 precursor RNA folds spatially, forming VGR411 folded precursor RNA, herein designated VGR FOLDED PRECURSOR RNA. It is appreciated that VGR411 folded precursor RNA, herein designated VGR FOLDED PRECURSOR RNA, comprises a plurality of what is known in the art as hairpin structures. These hairpin structures are due to the fact that the nucleotide sequence of VGR411 precursor RNA comprises a plurality of segments, the first half of each such segment having a nucleotide sequence which is at least a partial inversed-reversed sequence of the second half thereof, as is well known in the art.

[5572] VGR411 folded precursor RNA, herein designated VGR FOLDED PRECURSOR RNA, is naturally processed by cellular enzymatic activity into at least 2 separate VGAM precursor RNAs, VGAM222 precursor RNA and VGAM223 precursor RNA, herein schematically represented by VGAM1 PRECURSOR and VGAM2 PRECURSOR respectively, each of which VGAM precursor RNAs being a hairpin shaped RNA segment, corresponding to VGAM PRECURSOR RNA of FIG. 8.

[5573] The above mentioned VGAM precursor RNAs are diced by DICER COMPLEX of FIG. 8, yielding respective short RNA segments of about 22 nucleotides in length, VGAM222 RNA and VGAM223 RNA respectively, herein schematically represented by VGAM1 RNA and VGAM2 RNA respectively, each of which VGAM RNAs corresponding to VGAM RNA of FIG. 8.

[5574] VGAM222 RNA, herein schematically represented by VGAM1 binds complimentarily to a host target binding site located in an untranslated region of VGAM222 host target RNA, herein schematically represented by VGAM1 HOST TARGET RNA, which host target binding site corresponds to a host target binding site such as BINDING SITE I, BINDING SITE II or BINDING SITE III of FIG. 1, thereby inhibiting translation of VGAM222 host target RNA, herein schematically represented by VGAM1 HOST TARGET RNA into VGAM222 host target protein, herein schematically represented by VGAM1 HOST TARGET PROTEIN, both of FIG. 1.

[5575] VGAM223 RNA, herein schematically represented by VGAM2 binds complimentarily to a host target binding site located in an untranslated region of VGAM223 host target RNA, herein schematically represented by VGAM2 HOST TARGET RNA, which host target binding site corresponds to a host target binding site such as BINDING SITE I, BINDING SITE II or BINDING SITE III of FIG. 1, thereby inhibiting translation of VGAM223 host target RNA, herein schematically represented by VGAM2 HOST TARGET RNA into VGAM223 host target protein, herein schematically represented by VGAM2 HOST TARGET PROTEIN, both of FIG. 1.

[5576] It is appreciated that a function of VGR411 gene, herein designated VGR GENE, is inhibition of expression of host target genes, as part of a novel viral mechanism of attacking a host. Accordingly, utilities of VGR411 gene include diagnosis, prevention and treatment of viral infection by. Specific functions, and accordingly utilities, of VGR411 gene, herein designated VGR GENE, correlate with, and may be deduced from, the identity of the host target genes, which are inhibited by VGAM RNAs comprised in the operon-like cluster of VGR411 gene: VGAM222 host target protein and VGAM223 host target protein, herein schematically represented by VGAM1 HOST TARGET PROTEIN and VGAM HOST TARGET PROTEIN respectively. The function of these host target genes is elaborated hereinabove with reference to VGAM222 and VGAM223

[5577] FIG. 9 further provides a conceptual description of novel bioinformatically detected regulatory viral gene, referred to here as Viral Genomic Record 412(VGR412) viral gene, which encodes an operon-like cluster of novel viral micro RNA-like genes, each of which in turn modulates expression of at least one host target gene, the function and utility of which at least one host target gene is known in the art.

[5578] VGR412 gene, herein designated VGR GENE, is a novel bioinformatically detected regulatory, non protein coding, RNA viral gene. The method by which VGR412 gene was detected is described hereinabove with reference to FIGS. 6-15.

[5579] VGR412 gene encodes VGR412 precursor RNA, herein designated VGR PRECURSOR RNA, an RNA molecule, typically several hundred nucleotides long.

[5580] VGR412 precursor RNA folds spatially, forming VGR412 folded precursor RNA, herein designated VGR FOLDED PRECURSOR RNA. It is appreciated that VGR412 folded precursor RNA, herein designated VGR FOLDED PRECURSOR RNA, comprises a plurality of what is known in the art as hairpin structures. These hairpin structures are due to the fact that the nucleotide sequence of VGR412 precursor RNA comprises a plurality of segments, the first half of each such segment having a nucleotide sequence which is at least a partial inversed-reversed sequence of the second half thereof, as is well known in the art.

[5581] VGR412 folded precursor RNA, herein designated VGR FOLDED PRECURSOR RNA, is naturally processed by cellular enzymatic activity into at least 4 separate VGAM precursor RNAs, VGAM224 precursor RNA, VGAM225 precursor RNA, VGAM226 precursor RNA and VGAM227 precursor RNA, herein schematically represented by VGAM1 PRECURSOR, VGAM2 PRECURSOR, VGAM3 PRECURSOR and VGAM4 PRECURSOR respectively, each of which VGAM precursor RNAs being a hairpin shaped RNA segment, corresponding to VGAM PRECURSOR RNA of FIG. 8.

[5582] The above mentioned VGAM precursor RNAs are diced by DICER COMPLEX of FIG. 8, yielding respective short RNA segments of about 22 nucleotides in length, VGAM224 RNA, VGAM225 RNA, VGAM226 RNA and VGAM227 RNA respectively, herein schematically represented by VGAM1 RNA, VGAM2 RNA, VGAM3 RNA and VGAM4 RNA respectively, each of which VGAM RNAs corresponding to VGAM RNA of FIG. 8.

[5583] VGAM224 RNA, herein schematically represented by VGAM1 binds complimentarily to a host target binding site located in an untranslated region of VGAM224 host target RNA, herein schematically represented by VGAM1 HOST TARGET RNA, which host target binding site corresponds to a host target binding site such as BINDING SITE 1, BINDING SITE II or BINDING SITE III of FIG. 1, thereby inhibiting translation of VGAM224 host target RNA, herein schematically represented by VGAM1 HOST TARGET RNA into VGAM224 host target protein, herein schematically represented by VGAM1 HOST TARGET PROTEIN, both of FIG. 1.

[5584] VGAM225 RNA, herein schematically represented by VGAM2 binds complimentarily to a host target binding site located in an untranslated region of VGAM225 host target RNA, herein schematically represented by VGAM2 HOST TARGET RNA, which host target binding site corresponds to a host target binding site such as BINDING SITE 1, BINDING SITE II or BINDING SITE III of FIG. 1, thereby inhibiting translation of VGAM225 host target RNA, herein schematically represented by VGAM2 HOST TARGET RNA into VGAM225 host target protein, herein schematically represented by VGAM2 HOST TARGET PROTEIN, both of FIG. 1.

[5585] VGAM226 RNA, herein schematically represented by VGAM3 binds complimentarily to a host target binding site located in an untranslated region of VGAM226 host target RNA, herein schematically represented by VGAM3 HOST TARGET RNA, which host target binding site corresponds to a host target binding site such as BINDING SITE 1, BINDING SITE II or BINDING SITE III of FIG. 1, thereby inhibiting translation of VGAM226 host target RNA, herein schematically represented by VGAM3 HOST TARGET RNA into VGAM226 host target protein, herein schematically represented by VGAM3 HOST TARGET PROTEIN, both of FIG. 1.

[5586] VGAM227 RNA, herein schematically represented by VGAM4 binds complimentarily to a host target binding site located in an untranslated region of VGAM227 host target RNA, herein schematically represented by VGAM4 HOST TARGET RNA, which host target binding site corresponds to a host target binding site such as BINDING SITE I, BINDING SITE II or BINDING SITE III of FIG. 1, thereby inhibiting translation of VGAM227 host target RNA, herein schematically represented by VGAM4 HOST TARGET RNA into VGAM227 host target protein, herein schematically represented by VGAM4 HOST TARGET PROTEIN, both of FIG. 1.

[5587] It is appreciated that a function of VGR412 gene, herein designated VGR GENE, is inhibition of expression of host target genes, as part of a novel viral mechanism of attacking a host. Accordingly, utilities of VGR412 gene include diagnosis, prevention and treatment of viral infection by. Specific functions, and accordingly utilities, of VGR412 gene, herein designated VGR GENE, correlate with, and may be deduced from, the identity of the host target genes, which are inhibited by VGAM RNAs comprised in the operon-like cluster of VGR412 gene: VGAM224 host target protein, VGAM225 host target protein, VGAM226 host target protein and VGAM227 host target protein, herein schematically represented by VGAM1 HOST TARGET PROTEIN through VGAM HOST TARGET PROTEIN respectively. The function of these host target genes is elaborated hereinabove with reference to VGAM224, VGAM225, VGAM226 and VGAM227

[5588] FIG. 9 further provides a conceptual description of novel bioinformatically detected regulatory viral gene, referred to here as Viral Genomic Record 413(VGR413) viral gene, which encodes an operon-like cluster of novel viral micro RNA-like genes, each of which in turn modulates expression of at least one host target gene, the function and utility of which at least one host target gene is known in the art.

[5589] VGR413 gene, herein designated VGR GENE, is a novel bioinformatically detected regulatory, non protein coding, RNA viral gene. The method by which VGR413 gene was detected is described hereinabove with reference to FIGS. 6-15.

[5590] VGR413 gene encodes VGR413 precursor RNA, herein designated VGR PRECURSOR RNA, an RNA molecule, typically several hundred nucleotides long.

[5591] VGR413 precursor RNA folds spatially, forming VGR413 folded precursor RNA, herein designated VGR FOLDED PRECURSOR RNA. It is appreciated that VGR413 folded precursor RNA, herein designated VGR FOLDED PRECURSOR RNA, comprises a plurality of what is known in the art as hairpin structures. These hairpin structures are due to the fact that the nucleotide sequence of VGR413 precursor RNA comprises a plurality of segments, the first half of each such segment having a nucleotide sequence which is at least a partial inversed-reversed sequence of the second half thereof, as is well known in the art.

[5592] VGR413 folded precursor RNA, herein designated VGR FOLDED PRECURSOR RNA, is naturally processed by cellular enzymatic activity into at least 4 separate VGAM precursor RNAs, VGAM230 precursor RNA, VGAM231 precursor RNA, VGAM232 precursor RNA and VGAM233 precursor RNA, herein schematically represented by VGAM1 PRECURSOR, VGAM2 PRECURSOR, VGAM3 PRECURSOR and VGAM4 PRECURSOR respectively, each of which VGAM precursor RNAs being a hairpin shaped RNA segment, corresponding to VGAM PRECURSOR RNA of FIG. 8.

[5593] The above mentioned VGAM precursor RNAs are diced by DICER COMPLEX of FIG. 8, yielding respective short RNA segments of about 22 nucleotides in length, VGAM230 RNA, VGAM231 RNA, VGAM232 RNA and VGAM233 RNA respectively, herein schematically represented by VGAM1 RNA, VGAM2 RNA, VGAM3 RNA and VGAM4 RNA respectively, each of which VGAM RNAs corresponding to VGAM RNA of FIG. 8.

[5594] VGAM230 RNA, herein schematically represented by VGAM1 binds complimentarily to a host target binding site located in an untranslated region of VGAM230 host target RNA, herein schematically represented by VGAM1 HOST TARGET RNA, which host target binding site corresponds to a host target binding site such as BINDING SITE I, BINDING SITE II or BINDING SITE III of FIG. 1, thereby inhibiting translation of VGAM230 host target RNA, herein schematically represented by VGAM1 HOST TARGET RNA into VGAM230 host target protein, herein schematically represented by VGAM1 HOST TARGET PROTEIN, both of FIG. 1.

[5595] VGAM231 RNA, herein schematically represented by VGAM2 binds complimentarily to a host target binding site located in an untranslated region of VGAM231 host target RNA, herein schematically represented by VGAM2 HOST TARGET RNA, which host target binding site corresponds to a host target binding site such as BINDING SITE I, BINDING SITE II or BINDING SITE III of FIG. 1, thereby inhibiting translation of VGAM231 host target RNA, herein schematically represented by VGAM2 HOST TARGET RNA into VGAM231 host target protein, herein schematically represented by VGAM2 HOST TARGET PROTEIN, both of FIG. 1.

[5596] VGAM232 RNA, herein schematically represented by VGAM3 binds complimentarily to a host target binding site located in an untranslated region of VGAM232 host target RNA, herein schematically represented by VGAM3 HOST TARGET RNA, which host target binding site corresponds to a host target binding site such as BINDING SITE I, BINDING SITE II or BINDING SITE III of FIG. 1, thereby inhibiting translation of VGAM232 host target RNA, herein schematically represented by VGAM3 HOST TARGET RNA into VGAM232 host target protein, herein schematically represented by VGAM3 HOST TARGET PROTEIN, both of FIG. 1.

[5597] VGAM233 RNA, herein schematically represented by VGAM4 binds complimentarily to a host target binding site located in an untranslated region of VGAM233 host target RNA, herein schematically represented by VGAM4 HOST TARGET RNA, which host target binding site corresponds to a host target binding site such as BINDING SITE I, BINDING SITE II or BINDING SITE III of FIG. 1, thereby inhibiting translation of VGAM233 host target RNA, herein schematically represented by VGAM4 HOST TARGET RNA into VGAM233 host target protein, herein schematically represented by VGAM4 HOST TARGET PROTEIN, both of FIG. 1.

[5598] It is appreciated that a function of VGR413 gene, herein designated VGR GENE, is inhibition of expression of host target genes, as part of a novel viral mechanism of attacking a host. Accordingly, utilities of VGR413 gene include diagnosis, prevention and treatment of viral infection by. Specific functions, and accordingly utilities, of VGR413 gene, herein designated VGR GENE, correlate with, and may be deduced from, the identity of the host target genes, which are inhibited by VGAM RNAs comprised in the operon-like cluster of VGR413 gene: VGAM230 host target protein, VGAM231 host target protein, VGAM232 host target protein and VGAM233 host target protein, herein schematically represented by VGAM1 HOST TARGET PROTEIN through VGAM HOST TARGET PROTEIN respectively. The function of these host target genes is elaborated hereinabove with reference to VGAM230, VGAM231, VGAM232 and VGAM233

[5599] FIG. 9 further provides a conceptual description of novel bioinformatically detected regulatory viral gene, referred to here as Viral Genomic Record 414(VGR414) viral gene, which encodes an operon-like cluster of novel viral micro RNA-like genes, each of which in turn modulates expression of at least one host target gene, the function and utility of which at least one host target gene is known in the art.

[5600] VGR414 gene, herein designated VGR GENE, is a novel bioinformatically detected regulatory, non protein coding, RNA viral gene. The method by which VGR414 gene was detected is described hereinabove with reference to FIGS. 6-15.

[5601] VGR414 gene encodes VGR414 precursor RNA, herein designated VGR PRECURSOR RNA, an RNA molecule, typically several hundred nucleotides long.

[5602] VGR414 precursor RNA folds spatially, forming VGR414 folded precursor RNA, herein designated VGR FOLDED PRECURSOR RNA. It is appreciated that VGR414 folded precursor RNA, herein designated VGR FOLDED PRECURSOR RNA, comprises a plurality of what is known in the art as hairpin structures. These hairpin structures are due to the fact that the nucleotide sequence of VGR414 precursor RNA comprises a plurality of segments, the first half of each such segment having a nucleotide sequence which is at least a partial inversed-reversed sequence of the second half thereof, as is well known in the art.

[5603] VGR414 folded precursor RNA, herein designated VGR FOLDED PRECURSOR RNA, is naturally processed by cellular enzymatic activity into at least 2 separate VGAM precursor RNAs, VGAM234 precursor RNA and VGAM235 precursor RNA, herein schematically represented by VGAM1 PRECURSOR and VGAM2 PRECURSOR respectively, each of which VGAM precursor RNAs being a hairpin shaped RNA segment, corresponding to VGAM PRECURSOR RNA of FIG. 8.

[5604] The above mentioned VGAM precursor RNAs are diced by DICER COMPLEX of FIG. 8, yielding respective short RNA segments of about 22 nucleotides in length, VGAM234 RNA and VGAM235 RNA respectively, herein schematically represented by VGAM1 RNA and VGAM2 RNA respectively, each of which VGAM RNAs corresponding to VGAM RNA of FIG. 8.

[5605] VGAM234 RNA, herein schematically represented by VGAM1 binds complimentarily to a host target binding site located in an untranslated region of VGAM234 host target RNA, herein schematically represented by VGAM1 HOST TARGET RNA, which host target binding site corresponds to a host target binding site such as BINDING SITE 1, BINDING SITE II or BINDING SITE III of FIG. 1, thereby inhibiting translation of VGAM234 host target RNA, herein schematically represented by VGAM1 HOST TARGET RNA into VGAM234 host target protein, herein schematically represented by VGAM1 HOST TARGET PROTEIN, both of FIG. 1.

[5606] VGAM235 RNA, herein schematically represented by VGAM2 binds complimentarily to a host target binding site located in an untranslated region of VGAM235 host target RNA, herein schematically represented by VGAM2 HOST TARGET RNA, which host target binding site corresponds to a host target binding site such as BINDING SITE 1, BINDING SITE II or BINDING SITE III of FIG. 1, thereby inhibiting translation of VGAM235 host target RNA, herein schematically represented by VGAM2 HOST TARGET RNA into VGAM235 host target protein, herein schematically represented by VGAM2 HOST TARGET PROTEIN, both of FIG. 1.

[5607] It is appreciated that a function of VGR414 gene, herein designated VGR GENE, is inhibition of expression of host target genes, as part of a novel viral mechanism of attacking a host. Accordingly, utilities of VGR414 gene include diagnosis, prevention and treatment of viral infection by. Specific functions, and accordingly utilities, of VGR414 gene, herein designated VGR GENE, correlate with, and may be deduced from, the identity of the host target genes, which are inhibited by VGAM RNAs comprised in the operon-like cluster of VGR414 gene: VGAM234 host target protein and VGAM235 host target protein, herein schematically represented by VGAM1 HOST TARGET PROTEIN and VGAM HOST TARGET PROTEIN respectively. The function of these host target genes is elaborated hereinabove with reference to VGAM234 and VGAM235

[5608] FIG. 9 further provides a conceptual description of novel bioinformatically detected regulatory viral gene, referred to here as Viral Genomic Record 415(VGR415) viral gene, which encodes an operon-like cluster of novel viral micro RNA-like genes, each of which in turn modulates expression of at least one host target gene, the function and utility of which at least one host target gene is known in the art.

[5609] VGR415 gene, herein designated VGR GENE, is a novel bioinformatically detected regulatory, non protein coding, RNA viral gene. The method by which VGR415 gene was detected is described hereinabove with reference to FIGS. 6-15.

[5610] VGR415 gene encodes VGR415 precursor RNA, herein designated VGR PRECURSOR RNA, an RNA molecule, typically several hundred nucleotides long.

[5611] VGR415 precursor RNA folds spatially, forming VGR415 folded precursor RNA, herein designated VGR FOLDED PRECURSOR RNA. It is appreciated that VGR415 folded precursor RNA, herein designated VGR FOLDED PRECURSOR RNA, comprises a plurality of what is known in the art as hairpin structures. These hairpin structures are due to the fact that the nucleotide sequence of VGR415 precursor RNA comprises a plurality of segments, the first half of each such segment having a nucleotide sequence which is at least a partial inversed-reversed sequence of the second half thereof, as is well known in the art.

[5612] VGR415 folded precursor RNA, herein designated VGR FOLDED PRECURSOR RNA, is naturally processed by cellular enzymatic activity into at least 2 separate VGAM precursor RNAs, VGAM237 precursor RNA and VGAM238 precursor RNA, herein schematically represented by VGAM1 PRECURSOR and VGAM2 PRECURSOR respectively, each of which VGAM precursor RNAs being a hairpin shaped RNA segment, corresponding to VGAM PRECURSOR RNA of FIG. 8.

[5613] The above mentioned VGAM precursor RNAs are diced by DICER COMPLEX of FIG. 8, yielding respective short RNA segments of about 22 nucleotides in length, VGAM237 RNA and VGAM238 RNA respectively, herein schematically represented by VGAM1 RNA and VGAM2 RNA respectively, each of which VGAM RNAs corresponding to VGAM RNA of FIG. 8.

[5614] VGAM237 RNA, herein schematically represented by VGAM1 binds complimentarily to a host target binding site located in an untranslated region of VGAM237 host target RNA, herein schematically represented by VGAM1 HOST TARGET RNA, which host target binding site corresponds to a host target binding site such as BINDING SITE 1, BINDING SITE II or BINDING SITE III of FIG. 1, thereby inhibiting translation of VGAM237 host target RNA, herein schematically represented by VGAM1 HOST TARGET RNA into VGAM237 host target protein, herein schematically represented by VGAM1 HOST TARGET PROTEIN, both of FIG. 1.

[5615] VGAM238 RNA, herein schematically represented by VGAM2 binds complimentarily to a host target binding site located in an untranslated region of VGAM238 host target RNA, herein schematically represented by VGAM2 HOST TARGET RNA, which host target binding site corresponds to a host target binding site such as BINDING SITE I, BINDING SITE II or BINDING SITE III of FIG. 1, thereby inhibiting translation of VGAM238 host target RNA, herein schematically represented by VGAM2 HOST TARGET RNA into VGAM238 host target protein, herein schematically represented by VGAM2 HOST TARGET PROTEIN, both of FIG. 1.

[5616] It is appreciated that a function of VGR415 gene, herein designated VGR GENE, is inhibition of expression of host target genes, as part of a novel viral mechanism of attacking a host. Accordingly, utilities of VGR415 gene include diagnosis, prevention and treatment of viral infection by. Specific functions, and accordingly utilities, of VGR415 gene, herein designated VGR GENE, correlate with, and may be deduced from, the identity of the host target genes, which are inhibited by VGAM RNAs comprised in the operon-like cluster of VGR415 gene: VGAM237 host target protein and VGAM238 host target protein, herein schematically represented by VGAM1 HOST TARGET PROTEIN and VGAM HOST TARGET PROTEIN respectively. The function of these host target genes is elaborated hereinabove with reference to VGAM237 and VGAM238

[5617] FIG. 9 further provides a conceptual description of novel bioinformatically detected regulatory viral gene, referred to here as Viral Genomic Record 416(VGR416) viral gene, which encodes an operon-like cluster of novel viral micro RNA-like genes, each of which in turn modulates expression of at least one host target gene, the function and utility of which at least one host target gene is known in the art.

[5618] VGR416 gene, herein designated VGR GENE, is a novel bioinformatically detected regulatory, non protein coding, RNA viral gene. The method by which VGR416 gene was detected is described hereinabove with reference to FIGS. 6-15.

[5619] VGR416 gene encodes VGR416 precursor RNA, herein designated VGR PRECURSOR RNA, an RNA molecule, typically several hundred nucleotides long.

[5620] VGR416 precursor RNA folds spatially, forming VGR416 folded precursor RNA, herein designated VGR FOLDED PRECURSOR RNA. It is appreciated that VGR416 folded precursor RNA, herein designated VGR FOLDED PRECURSOR RNA, comprises a plurality of what is known in the art as hairpin structures. These hairpin structures are due to the fact that the nucleotide sequence of VGR416 precursor RNA comprises a plurality of segments, the first half of each such segment having a nucleotide sequence which is at least a partial inversed-reversed sequence of the second half thereof, as is well known in the art.

[5621] VGR416 folded precursor RNA, herein designated VGR FOLDED PRECURSOR RNA, is naturally processed by cellular enzymatic activity into at least 2 separate VGAM precursor RNAs, VGAM240 precursor RNA and VGAM241 precursor RNA, herein schematically represented by VGAM1 PRECURSOR and VGAM2 PRECURSOR respectively, each of which VGAM precursor RNAs being a hairpin shaped RNA segment, corresponding to VGAM PRECURSOR RNA of FIG. 8.

[5622] The above mentioned VGAM precursor RNAs are diced by DICER COMPLEX of FIG. 8, yielding respective short RNA segments of about 22 nucleotides in length, VGAM240 RNA and VGAM241 RNA respectively, herein schematically represented by VGAM1 RNA and VGAM2 RNA respectively, each of which VGAM RNAs corresponding to VGAM RNA of FIG. 8.

[5623] VGAM240 RNA, herein schematically represented by VGAM1 binds complimentarily to a host target binding site located in an untranslated region of VGAM240 host target RNA, herein schematically represented by VGAM1 HOST TARGET RNA, which host target binding site corresponds to a host target binding site such as BINDING SITE I, BINDING SITE II or BINDING SITE III of FIG. 1, thereby inhibiting translation of VGAM240 host target RNA, herein schematically represented by VGAM1 HOST TARGET RNA into VGAM240 host target protein, herein schematically represented by VGAM1 HOST TARGET PROTEIN, both of FIG. 1.

[5624] VGAM241 RNA, herein schematically represented by VGAM2 binds complimentarily to a host target binding site located in an untranslated region of VGAM241 host target RNA, herein schematically represented by VGAM2 HOST TARGET RNA, which host target binding site corresponds to a host target binding site such as BINDING SITE I, BINDING SITE II or BINDING SITE III of FIG. 1, thereby inhibiting translation of VGAM241 host target RNA, herein schematically represented by VGAM2 HOST TARGET RNA into VGAM241 host target protein, herein schematically represented by VGAM2 HOST TARGET PROTEIN, both of FIG. 1.

[5625] It is appreciated that a function of VGR416 gene, herein designated VGR GENE, is inhibition of expression of host target genes, as part of a novel viral mechanism of attacking a host. Accordingly, utilities of VGR416 gene include diagnosis, prevention and treatment of viral infection by. Specific functions, and accordingly utilities, of VGR416 gene, herein designated VGR GENE, correlate with, and may be deduced from, the identity of the host target genes, which are inhibited by VGAM RNAs comprised in the operon-like cluster of VGR416 gene: VGAM240 host target protein and VGAM241 host target protein, herein schematically represented by VGAM1 HOST TARGET PROTEIN and VGAM HOST TARGET PROTEIN respectively. The function of these host target genes is elaborated hereinabove with reference to VGAM240 and VGAM241

[5626] FIG. 9 further provides a conceptual description of novel bioinformatically detected regulatory viral gene, referred to here as Viral Genomic Record 417(VGR417) viral gene, which encodes an operon-like cluster of novel viral micro RNA-like genes, each of which in turn modulates expression of at least one host target gene, the function and utility of which at least one host target gene is known in the art.

[5627] VGR417 gene, herein designated VGR GENE, is a novel bioinformatically detected regulatory, non protein coding, RNA viral gene. The method by which VGR417 gene was detected is described hereinabove with reference to FIGS. 6-15.

[5628] VGR417 gene encodes VGR417 precursor RNA, herein designated VGR PRECURSOR RNA, an RNA molecule, typically several hundred nucleotides long.

[5629] VGR417 precursor RNA folds spatially, forming VGR417 folded precursor RNA, herein designated VGR FOLDED PRECURSOR RNA. It is appreciated that VGR417 folded precursor RNA, herein designated VGR FOLDED PRECURSOR RNA, comprises a plurality of what is known in the art as hairpin structures. These hairpin structures are due to the fact that the nucleotide sequence of VGR417 precursor RNA comprises a plurality of segments, the first half of each such segment having a nucleotide sequence which is at least a partial inversed-reversed sequence of the second half thereof, as is well known in the art.

[5630] VGR417 folded precursor RNA, herein designated VGR FOLDED PRECURSOR RNA, is naturally processed by cellular enzymatic activity into at least 4 separate VGAM precursor RNAs, VGAM243 precursor RNA, VGAM244 precursor RNA, VGAM245 precursor RNA and VGAM246 precursor RNA, herein schematically represented by VGAM1 PRECURSOR, VGAM2 PRECURSOR, VGAM3 PRECURSOR and VGAM4 PRECURSOR respectively, each of which VGAM precursor RNAs being a hairpin shaped RNA segment, corresponding to VGAM PRECURSOR RNA of FIG. 8.

[5631] The above mentioned VGAM precursor RNAs are diced by DICER COMPLEX of FIG. 8, yielding respective short RNA segments of about 22 nucleotides in length, VGAM243 RNA, VGAM244 RNA, VGAM245 RNA and VGAM246 RNA respectively, herein schematically represented by VGAM1 RNA, VGAM2 RNA, VGAM3 RNA and VGAM4 RNA respectively, each of which VGAM RNAs corresponding to VGAM RNA of FIG. 8.

[5632] VGAM243 RNA, herein schematically represented by VGAM1 binds complimentarily to a host target binding site located in an untranslated region of VGAM243 host target RNA, herein schematically represented by VGAM1 HOST TARGET RNA, which host target binding site corresponds to a host target binding site such as BINDING SITE 1, BINDING SITE II or BINDING SITE III of FIG. 1, thereby inhibiting translation of VGAM243 host target RNA, herein schematically represented by VGAM1 HOST TARGET RNA into VGAM243 host target protein, herein schematically represented by VGAM1 HOST TARGET PROTEIN, both of FIG. 1.

[5633] VGAM244 RNA, herein schematically represented by VGAM2 binds complimentarily to a host target binding site located in an untranslated region of VGAM244 host target RNA, herein schematically represented by VGAM2 HOST TARGET RNA, which host target binding site corresponds to a host target binding site such as BINDING SITE 1, BINDING SITE II or BINDING SITE III of FIG. 1, thereby inhibiting translation of VGAM244 host target RNA, herein schematically represented by VGAM2 HOST TARGET RNA into VGAM244 host target protein, herein schematically represented by VGAM2 HOST TARGET PROTEIN, both of FIG. 1.

[5634] VGAM245 RNA, herein schematically represented by VGAM3 binds complimentarily to a host target binding site located in an untranslated region of VGAM245 host target RNA, herein schematically represented by VGAM3 HOST TARGET RNA, which host target binding site corresponds to a host target binding site such as BINDING SITE I, BINDING SITE II or BINDING SITE III of FIG. 1, thereby inhibiting translation of VGAM245 host target RNA, herein schematically represented by VGAM3 HOST TARGET RNA into VGAM245 host target protein, herein schematically represented by VGAM3 HOST TARGET PROTEIN, both of FIG. 1.

[5635] VGAM246 RNA, herein schematically represented by VGAM4 binds complimentarily to a host target binding site located in an untranslated region of VGAM246 host target RNA, herein schematically represented by VGAM4 HOST TARGET RNA, which host target binding site corresponds to a host target binding site such as BINDING SITE I, BINDING SITE II or BINDING SITE III of FIG. 1, thereby inhibiting translation of VGAM246 host target RNA, herein schematically represented by VGAM4 HOST TARGET RNA into VGAM246 host target protein, herein schematically represented by VGAM4 HOST TARGET PROTEIN, both of FIG. 1.

[5636] It is appreciated that a function of VGR417 gene, herein designated VGR GENE, is inhibition of expression of host target genes, as part of a novel viral mechanism of attacking a host. Accordingly, utilities of VGR417 gene include diagnosis, prevention and treatment of viral infection by. Specific functions, and accordingly utilities, of VGR417 gene, herein designated VGR GENE, correlate with, and may be deduced from, the identity of the host target genes, which are inhibited by VGAM RNAs comprised in the operon-like cluster of VGR417 gene: VGAM243 host target protein, VGAM244 host target protein, VGAM245 host target protein and VGAM246 host target protein, herein schematically represented by VGAM1 HOST TARGET PROTEIN through VGAM HOST TARGET PROTEIN respectively. The function of these host target genes is elaborated hereinabove with reference to VGAM243, VGAM244, VGAM245 and VGAM246

[5637] FIG. 9 further provides a conceptual description of novel bioinformatically detected regulatory viral gene, referred to here as Viral Genomic Record 418(VGR418) viral gene, which encodes an operon-like cluster of novel viral micro RNA-like genes, each of which in turn modulates expression of at least one host target gene, the function and utility of which at least one host target gene is known in the art.

[5638] VGR418 gene, herein designated VGR GENE, is a novel bioinformatically detected regulatory, non protein coding, RNA viral gene. The method by which VGR418 gene was detected is described hereinabove with reference to FIGS. 6-15.

[5639] VGR418 gene encodes VGR418 precursor RNA, herein designated VGR PRECURSOR RNA, an RNA molecule, typically several hundred nucleotides long.

[5640] VGR418 precursor RNA folds spatially, forming VGR418 folded precursor RNA, herein designated VGR FOLDED PRECURSOR RNA. It is appreciated that VGR418 folded precursor RNA, herein designated VGR FOLDED PRECURSOR RNA, comprises a plurality of what is known in the art as hairpin structures. These hairpin structures are due to the fact that the nucleotide sequence of VGR418 precursor RNA comprises a plurality of segments, the first half of each such segment having a nucleotide sequence which is at least a partial inversed-reversed sequence of the second half thereof, as is well known in the art.

[5641] VGR418 folded precursor RNA, herein designated VGR FOLDED PRECURSOR RNA, is naturally processed by cellular enzymatic activity into at least 4 separate VGAM precursor RNAs, VGAM247 precursor RNA, VGAM248 precursor RNA, VGAM249 precursor RNA and VGAM250 precursor RNA, herein schematically represented by VGAM1 PRECURSOR, VGAM2 PRECURSOR, VGAM3 PRECURSOR and VGAM4 PRECURSOR respectively, each of which VGAM precursor RNAs being a hairpin shaped RNA segment, corresponding to VGAM PRECURSOR RNA of FIG. 8.

[5642] The above mentioned VGAM precursor RNAs are diced by DICER COMPLEX of FIG. 8, yielding respective short RNA segments of about 22 nucleotides in length, VGAM247 RNA, VGAM248 RNA, VGAM249 RNA and VGAM250 RNA respectively, herein schematically represented by VGAM1 RNA, VGAM2 RNA, VGAM3 RNA and VGAM4 RNA respectively, each of which VGAM RNAs corresponding to VGAM RNA of FIG. 8.

[5643] VGAM247 RNA, herein schematically represented by VGAM1 binds complimentarily to a host target binding site located in an untranslated region of VGAM247 host target RNA, herein schematically represented by VGAM1 HOST TARGET RNA, which host target binding site corresponds to a host target binding site such as BINDING SITE 1, BINDING SITE II or BINDING SITE III of FIG. 1, thereby inhibiting translation of VGAM247 host target RNA, herein schematically represented by VGAM1 HOST TARGET RNA into VGAM247 host target protein, herein schematically represented by VGAM1 HOST TARGET PROTEIN, both of FIG. 1.

[5644] VGAM248 RNA, herein schematically represented by VGAM2 binds complimentarily to a host target binding site located in an untranslated region of VGAM248 host target RNA, herein schematically represented by VGAM2 HOST TARGET RNA, which host target binding site corresponds to a host target binding site such as BINDING SITE 1, BINDING SITE II or BINDING SITE III of FIG. 1, thereby inhibiting translation of VGAM248 host target RNA, herein schematically represented by VGAM2 HOST TARGET RNA into VGAM248 host target protein, herein schematically represented by VGAM2 HOST TARGET PROTEIN, both of FIG. 1.

[5645] VGAM249 RNA, herein schematically represented by VGAM3 binds complimentarily to a host target binding site located in an untranslated region of VGAM249 host target RNA, herein schematically represented by VGAM3 HOST TARGET RNA, which host target binding site corresponds to a host target binding site such as BINDING SITE 1, BINDING SITE II or BINDING SITE III of FIG. 1, thereby inhibiting translation of VGAM249 host target RNA, herein schematically represented by VGAM3 HOST TARGET RNA into VGAM249 host target protein, herein schematically represented by VGAM3 HOST TARGET PROTEIN, both of FIG. 1.

[5646] VGAM250 RNA, herein schematically represented by VGAM4 binds complimentarily to a host target binding site located in an untranslated region of VGAM250 host target RNA, herein schematically represented by VGAM4 HOST TARGET RNA, which host target binding site corresponds to a host target binding site such as BINDING SITE I, BINDING SITE II or BINDING SITE III of FIG. 1, thereby inhibiting translation of VGAM250 host target RNA, herein schematically represented by VGAM4 HOST TARGET RNA into VGAM250 host target protein, herein schematically represented by VGAM4 HOST TARGET PROTEIN, both of FIG. 1.

[5647] It is appreciated that a function of VGR418 gene, herein designated VGR GENE, is inhibition of expression of host target genes, as part of a novel viral mechanism of attacking a host. Accordingly, utilities of VGR418 gene include diagnosis, prevention and treatment of viral infection by. Specific functions, and accordingly utilities, of VGR418 gene, herein designated VGR GENE, correlate with, and may be deduced from, the identity of the host target genes, which are inhibited by VGAM RNAs comprised in the operon-like cluster of VGR418 gene: VGAM247 host target protein, VGAM248 host target protein, VGAM249 host target protein and VGAM250 host target protein, herein schematically represented by VGAM1 HOST TARGET PROTEIN through VGAM HOST TARGET PROTEIN respectively. The function of these host target genes is elaborated hereinabove with reference to VGAM247, VGAM248, VGAM249 and VGAM250

[5648] FIG. 9 further provides a conceptual description of novel bioinformatically detected regulatory viral gene, referred to here as Viral Genomic Record 419(VGR419) viral gene, which encodes an operon-like cluster of novel viral micro RNA-like genes, each of which in turn modulates expression of at least one host target gene, the function and utility of which at least one host target gene is known in the art.

[5649] VGR419 gene, herein designated VGR GENE, is a novel bioinformatically detected regulatory, non protein coding, RNA viral gene. The method by which VGR419 gene was detected is described hereinabove with reference to FIGS. 6-15.

[5650] VGR419 gene encodes VGR419 precursor RNA, herein designated VGR PRECURSOR RNA, an RNA molecule, typically several hundred nucleotides long.

[5651] VGR419 precursor RNA folds spatially, forming VGR419 folded precursor RNA, herein designated VGR FOLDED PRECURSOR RNA. It is appreciated that VGR419 folded precursor RNA, herein designated VGR FOLDED PRECURSOR RNA, comprises a plurality of what is known in the art as hairpin structures. These hairpin structures are due to the fact that the nucleotide sequence of VGR419 precursor RNA comprises a plurality of segments, the first half of each such segment having a nucleotide sequence which is at least a partial inversed-reversed sequence of the second half thereof, as is well known in the art.

[5652] VGR419 folded precursor RNA, herein designated VGR FOLDED PRECURSOR RNA, is naturally processed by cellular enzymatic activity into at least 3 separate VGAM precursor RNAs, VGAM253 precursor RNA, VGAM254 precursor RNA and VGAM255 precursor RNA, herein schematically represented by VGAM1 PRECURSOR, VGAM2 PRECURSOR and VGAM3 PRECURSOR respectively, each of which VGAM precursor RNAs being a hairpin shaped RNA segment, corresponding to VGAM PRECURSOR RNA of FIG. 8.

[5653] The above mentioned VGAM precursor RNAs are diced by DICER COMPLEX of FIG. 8, yielding respective short RNA segments of about 22 nucleotides in length, VGAM253 RNA, VGAM254 RNA and VGAM255 RNA respectively, herein schematically represented by VGAM1 RNA, VGAM2 RNA and VGAM3 RNA respectively, each of which VGAM RNAs corresponding to VGAM RNA of FIG. 8.

[5654] VGAM253 RNA, herein schematically represented by VGAM1 binds complimentarily to a host target binding site located in an untranslated region of VGAM253 host target RNA, herein schematically represented by VGAM1 HOST TARGET RNA, which host target binding site corresponds to a host target binding site such as BINDING SITE 1, BINDING SITE II or BINDING SITE III of FIG. 1, thereby inhibiting translation of VGAM253 host target RNA, herein schematically represented by VGAM1 HOST TARGET RNA into VGAM253 host target protein, herein schematically represented by VGAM1 HOST TARGET PROTEIN, both of FIG. 1.

[5655] VGAM254 RNA, herein schematically represented by VGAM2 binds complimentarily to a host target binding site located in an untranslated region of VGAM254 host target RNA, herein schematically represented by VGAM2 HOST TARGET RNA, which host target binding site corresponds to a host target binding site such as BINDING SITE I, BINDING SITE II or BINDING SITE III of FIG. 1, thereby inhibiting translation of VGAM254 host target RNA, herein schematically represented by VGAM2 HOST TARGET RNA into VGAM254 host target protein, herein schematically represented by VGAM2 HOST TARGET PROTEIN, both of FIG. 1.

[5656] VGAM255 RNA, herein schematically represented by VGAM3 binds complimentarily to a host target binding site located in an untranslated region of VGAM255 host target RNA, herein schematically represented by VGAM3 HOST TARGET RNA, which host target binding site corresponds to a host target binding site such as BINDING SITE I, BINDING SITE II or BINDING SITE III of FIG. 1, thereby inhibiting translation of VGAM255 host target RNA, herein schematically represented by VGAM3 HOST TARGET RNA into VGAM255 host target protein, herein schematically represented by VGAM3 HOST TARGET PROTEIN, both of FIG. 1.

[5657] It is appreciated that a function of VGR419 gene, herein designated VGR GENE, is inhibition of expression of host target genes, as part of a novel viral mechanism of attacking a host. Accordingly, utilities of VGR419 gene include diagnosis, prevention and treatment of viral infection by. Specific functions, and accordingly utilities, of VGR419 gene, herein designated VGR GENE, correlate with, and may be deduced from, the identity of the host target genes, which are inhibited by VGAM RNAs comprised in the operon-like cluster of VGR419 gene: VGAM253 host target protein, VGAM254 host target protein and VGAM255 host target protein, herein schematically represented by VGAM1 HOST TARGET PROTEIN through VGAM HOST TARGET PROTEIN respectively. The function of these host target genes is elaborated hereinabove with reference to VGAM253, VGAM254 and VGAM255

[5658] FIG. 9 further provides a conceptual description of novel bioinformatically detected regulatory viral gene, referred to here as Viral Genomic Record 420(VGR420) viral gene, which encodes an operon-like cluster of novel viral micro RNA-like genes, each of which in turn modulates expression of at least one host target gene, the function and utility of which at least one host target gene is known in the art.

[5659] VGR420 gene, herein designated VGR GENE, is a novel bioinformatically detected regulatory, non protein coding, RNA viral gene. The method by which VGR420 gene was detected is described hereinabove with reference to FIGS. 6-15.

[5660] VGR420 gene encodes VGR420 precursor RNA, herein designated VGR PRECURSOR RNA, an RNA molecule, typically several hundred nucleotides long.

[5661] VGR420 precursor RNA folds spatially, forming VGR420 folded precursor RNA, herein designated VGR FOLDED PRECURSOR RNA. It is appreciated that VGR420 folded precursor RNA, herein designated VGR FOLDED PRECURSOR RNA, comprises a plurality of what is known in the art as hairpin structures. These hairpin structures are due to the fact that the nucleotide sequence of VGR420 precursor RNA comprises a plurality of segments, the first half of each such segment having a nucleotide sequence which is at least a partial inversed-reversed sequence of the second half thereof, as is well known in the art.

[5662] VGR420 folded precursor RNA, herein designated VGR FOLDED PRECURSOR RNA, is naturally processed by cellular enzymatic activity into at least 2 separate VGAM precursor RNAs, VGAM256 precursor RNA and VGAM257 precursor RNA, herein schematically represented by VGAM1 PRECURSOR and VGAM2 PRECURSOR respectively, each of which VGAM precursor RNAs being a hairpin shaped RNA segment, corresponding to VGAM PRECURSOR RNA of FIG. 8.

[5663] The above mentioned VGAM precursor RNAs are diced by DICER COMPLEX of FIG. 8, yielding respective short RNA segments of about 22 nucleotides in length, VGAM256 RNA and VGAM257 RNA respectively, herein schematically represented by VGAM1 RNA and VGAM2 RNA respectively, each of which VGAM RNAs corresponding to VGAM RNA of FIG. 8.

[5664] VGAM256 RNA, herein schematically represented by VGAM1 binds complimentarily to a host target binding site located in an untranslated region of VGAM256 host target RNA, herein schematically represented by VGAM1 HOST TARGET RNA, which host target binding site corresponds to a host target binding site such as BINDING SITE 1, BINDING SITE II or BINDING SITE III of FIG. 1, thereby inhibiting translation of VGAM256 host target RNA, herein schematically represented by VGAM1 HOST TARGET RNA into VGAM256 host target protein, herein schematically represented by VGAM1 HOST TARGET PROTEIN, both of FIG. 1.

[5665] VGAM257 RNA, herein schematically represented by VGAM2 binds complimentarily to a host target binding site located in an untranslated region of VGAM257 host target RNA, herein schematically represented by VGAM2 HOST TARGET RNA, which host target binding site corresponds to a host target binding site such as BINDING SITE 1, BINDING SITE II or BINDING SITE III of FIG. 1, thereby inhibiting translation of VGAM257 host target RNA, herein schematically represented by VGAM2 HOST TARGET RNA into VGAM257 host target protein, herein schematically represented by VGAM2 HOST TARGET PROTEIN, both of FIG. 1.

[5666] It is appreciated that a function of VGR420 gene, herein designated VGR GENE, is inhibition of expression of host target genes, as part of a novel viral mechanism of attacking a host. Accordingly, utilities of VGR420 gene include diagnosis, prevention and treatment of viral infection by. Specific functions, and accordingly utilities, of VGR420 gene, herein designated VGR GENE, correlate with, and may be deduced from, the identity of the host target genes, which are inhibited by VGAM RNAs comprised in the operon-like cluster of VGR420 gene: VGAM256 host target protein and VGAM257 host target protein, herein schematically represented by VGAM1 HOST TARGET PROTEIN and VGAM HOST TARGET PROTEIN respectively. The function of these host target genes is elaborated hereinabove with reference to VGAM256 and VGAM257

[5667] FIG. 9 further provides a conceptual description of novel bioinformatically detected regulatory viral gene, referred to here as Viral Genomic Record 421(VGR421) viral gene, which encodes an operon-like cluster of novel viral micro RNA-like genes, each of which in turn modulates expression of at least one host target gene, the function and utility of which at least one host target gene is known in the art.

[5668] VGR421 gene, herein designated VGR GENE, is a novel bioinformatically detected regulatory, non protein coding, RNA viral gene. The method by which VGR421 gene was detected is described hereinabove with reference to FIGS. 6-15.

[5669] VGR421 gene encodes VGR421 precursor RNA, herein designated VGR PRECURSOR RNA, an RNA molecule, typically several hundred nucleotides long.

[5670] VGR421 precursor RNA folds spatially, forming VGR421 folded precursor RNA, herein designated VGR FOLDED PRECURSOR RNA. It is appreciated that VGR421 folded precursor RNA, herein designated VGR FOLDED PRECURSOR RNA, comprises a plurality of what is known in the art as hairpin structures. These hairpin structures are due to the fact that the nucleotide sequence of VGR421 precursor RNA comprises a plurality of segments, the first half of each such segment having a nucleotide sequence which is at least a partial inversed-reversed sequence of the second half thereof, as is well known in the art.

[5671] VGR421 folded precursor RNA, herein designated VGR FOLDED PRECURSOR RNA, is naturally processed by cellular enzymatic activity into at least 3 separate VGAM precursor RNAs, VGAM263 precursor RNA, VGAM264 precursor RNA and VGAM265 precursor RNA, herein schematically represented by VGAM1 PRECURSOR, VGAM2 PRECURSOR and VGAM3 PRECURSOR respectively, each of which VGAM precursor RNAs being a hairpin shaped RNA segment, corresponding to VGAM PRECURSOR RNA of FIG. 8.

[5672] The above mentioned VGAM precursor RNAs are diced by DICER COMPLEX of FIG. 8, yielding respective short RNA segments of about 22 nucleotides in length, VGAM263 RNA, VGAM264 RNA and VGAM265 RNA respectively, herein schematically represented by VGAM1 RNA, VGAM2 RNA and VGAM3 RNA respectively, each of which VGAM RNAs corresponding to VGAM RNA of FIG. 8.

[5673] VGAM263 RNA, herein schematically represented by VGAM1 binds complimentarily to a host target binding site located in an untranslated region of VGAM263 host target RNA, herein schematically represented by VGAM1 HOST TARGET RNA, which host target binding site corresponds to a host target binding site such as BINDING SITE 1, BINDING SITE II or BINDING SITE III of FIG. 1, thereby inhibiting translation of VGAM263 host target RNA, herein schematically represented by VGAM1 HOST TARGET RNA into VGAM263 host target protein, herein schematically represented by VGAM1 HOST TARGET PROTEIN, both of FIG. 1.

[5674] VGAM264 RNA, herein schematically represented by VGAM2 binds complimentarily to a host target binding site located in an untranslated region of VGAM264 host target RNA, herein schematically represented by VGAM2 HOST TARGET RNA, which host target binding site corresponds to a host target binding site such as BINDING SITE 1, BINDING SITE II or BINDING SITE III of FIG. 1, thereby inhibiting translation of VGAM264 host target RNA, herein schematically represented by VGAM2 HOST TARGET RNA into VGAM264 host target protein, herein schematically represented by VGAM2 HOST TARGET PROTEIN, both of FIG. 1.

[5675] VGAM265 RNA, herein schematically represented by VGAM3 binds complimentarily to a host target binding site located in an untranslated region of VGAM265 host target RNA, herein schematically represented by VGAM3 HOST TARGET RNA, which host target binding site corresponds to a host target binding site such as BINDING SITE I, BINDING SITE II or BINDING SITE III of FIG. 1, thereby inhibiting translation of VGAM265 host target RNA, herein schematically represented by VGAM3 HOST TARGET RNA into VGAM265 host target protein, herein schematically represented by VGAM3 HOST TARGET PROTEIN, both of FIG. 1.

[5676] It is appreciated that a function of VGR421 gene, herein designated VGR GENE, is inhibition of expression of host target genes, as part of a novel viral mechanism of attacking a host. Accordingly, utilities of VGR421 gene include diagnosis, prevention and treatment of viral infection by. Specific functions, and accordingly utilities, of VGR421 gene, herein designated VGR GENE, correlate with, and may be deduced from, the identity of the host target genes, which are inhibited by VGAM RNAs comprised in the operon-like cluster of VGR421 gene: VGAM263 host target protein, VGAM264 host target protein and VGAM265 host target protein, herein schematically represented by VGAM1 HOST TARGET PROTEIN through VGAM HOST TARGET PROTEIN respectively. The function of these host target genes is elaborated hereinabove with reference to VGAM263, VGAM264 and VGAM265

[5677] FIG. 9 further provides a conceptual description of novel bioinformatically detected regulatory viral gene, referred to here as Viral Genomic Record 422(VGR422) viral gene, which encodes an operon-like cluster of novel viral micro RNA-like genes, each of which in turn modulates expression of at least one host target gene, the function and utility of which at least one host target gene is known in the art.

[5678] VGR422 gene, herein designated VGR GENE, is a novel bioinformatically detected regulatory, non protein coding, RNA viral gene. The method by which VGR422 gene was detected is described hereinabove with reference to FIGS. 6-15.

[5679] VGR422 gene encodes VGR422 precursor RNA, herein designated VGR PRECURSOR RNA, an RNA molecule, typically several hundred nucleotides long.

[5680] VGR422 precursor RNA folds spatially, forming VGR422 folded precursor RNA, herein designated VGR FOLDED PRECURSOR RNA. It is appreciated that VGR422 folded precursor RNA, herein designated VGR FOLDED PRECURSOR RNA, comprises a plurality of what is known in the art as hairpin structures. These hairpin structures are due to the fact that the nucleotide sequence of VGR422 precursor RNA comprises a plurality of segments, the first half of each such segment having a nucleotide sequence which is at least a partial inversed-reversed sequence of the second half thereof, as is well known in the art.

[5681] VGR422 folded precursor RNA, herein designated VGR FOLDED PRECURSOR RNA, is naturally processed by cellular enzymatic activity into at least 2 separate VGAM precursor RNAs, VGAM266 precursor RNA and VGAM267 precursor RNA, herein schematically represented by VGAM1 PRECURSOR and VGAM2 PRECURSOR respectively, each of which VGAM precursor RNAs being a hairpin shaped RNA segment, corresponding to VGAM PRECURSOR RNA of FIG. 8.

[5682] The above mentioned VGAM precursor RNAs are diced by DICER COMPLEX of FIG. 8, yielding respective short RNA segments of about 22 nucleotides in length, VGAM266 RNA and VGAM267 RNA respectively, herein schematically represented by VGAM1 RNA and VGAM2 RNA respectively, each of which VGAM RNAs corresponding to VGAM RNA of FIG. 8.

[5683] VGAM266 RNA, herein schematically represented by VGAM1 binds complimentarily to a host target binding site located in an untranslated region of VGAM266 host target RNA, herein schematically represented by VGAM1 HOST TARGET RNA, which host target binding site corresponds to a host target binding site such as BINDING SITE 1, BINDING SITE II or BINDING SITE III of FIG. 1, thereby inhibiting translation of VGAM266 host target RNA, herein schematically represented by VGAM1 HOST TARGET RNA into VGAM266 host target protein, herein schematically represented by VGAM1 HOST TARGET PROTEIN, both of FIG. 1.

[5684] VGAM267 RNA, herein schematically represented by VGAM2 binds complimentarily to a host target binding site located in an untranslated region of VGAM267 host target RNA, herein schematically represented by VGAM2 HOST TARGET RNA, which host target binding site corresponds to a host target binding site such as BINDING SITE 1, BINDING SITE II or BINDING SITE III of FIG. 1, thereby inhibiting translation of VGAM267 host target RNA, herein schematically represented by VGAM2 HOST TARGET RNA into VGAM267 host target protein, herein schematically represented by VGAM2 HOST TARGET PROTEIN, both of FIG. 1.

[5685] It is appreciated that a function of VGR422 gene, herein designated VGR GENE, is inhibition of expression of host target genes, as part of a novel viral mechanism of attacking a host. Accordingly, utilities of VGR422 gene include diagnosis, prevention and treatment of viral infection by. Specific functions, and accordingly utilities, of VGR422 gene, herein designated VGR GENE, correlate with, and may be deduced from, the identity of the host target genes, which are inhibited by VGAM RNAs comprised in the operon-like cluster of VGR422 gene: VGAM266 host target protein and VGAM267 host target protein, herein schematically represented by VGAM1 HOST TARGET PROTEIN and VGAM HOST TARGET PROTEIN respectively. The function of these host target genes is elaborated hereinabove with reference to VGAM266 and VGAM267

[5686] FIG. 9 further provides a conceptual description of novel bioinformatically detected regulatory viral gene, referred to here as Viral Genomic Record 423(VGR423) viral gene, which encodes an operon-like cluster of novel viral micro RNA-like genes, each of which in turn modulates expression of at least one host target gene, the function and utility of which at least one host target gene is known in the art.

[5687] VGR423 gene, herein designated VGR GENE, is a novel bioinformatically detected regulatory, non protein coding, RNA viral gene. The method by which VGR423 gene was detected is described hereinabove with reference to FIGS. 6-15.

[5688] VGR423 gene encodes VGR423 precursor RNA, herein designated VGR PRECURSOR RNA, an RNA molecule, typically several hundred nucleotides long.

[5689] VGR423 precursor RNA folds spatially, forming VGR423 folded precursor RNA, herein designated VGR FOLDED PRECURSOR RNA. It is appreciated that VGR423 folded precursor RNA, herein designated VGR FOLDED PRECURSOR RNA, comprises a plurality of what is known in the art as hairpin structures. These hairpin structures are due to the fact that the nucleotide sequence of VGR423 precursor RNA comprises a plurality of segments, the first half of each such segment having a nucleotide sequence which is at least a partial inversed-reversed sequence of the second half thereof, as is well known in the art.

[5690] VGR423 folded precursor RNA, herein designated VGR FOLDED PRECURSOR RNA, is naturally processed by cellular enzymatic activity into at least 3 separate VGAM precursor RNAs, VGAM268 precursor RNA, VGAM269 precursor RNA and VGAM270 precursor RNA, herein schematically represented by VGAM1 PRECURSOR, VGAM2 PRECURSOR and VGAM3 PRECURSOR respectively, each of which VGAM precursor RNAs being a hairpin shaped RNA segment, corresponding to VGAM PRECURSOR RNA of FIG. 8.

[5691] The above mentioned VGAM precursor RNAs are diced by DICER COMPLEX of FIG. 8, yielding respective short RNA segments of about 22 nucleotides in length, VGAM268 RNA, VGAM269 RNA and VGAM270 RNA respectively, herein schematically represented by VGAM1 RNA, VGAM2 RNA and VGAM3 RNA respectively, each of which VGAM RNAs corresponding to VGAM RNA of FIG. 8.

[5692] VGAM268 RNA, herein schematically represented by VGAM1 binds complimentarily to a host target binding site located in an untranslated region of VGAM268 host target RNA, herein schematically represented by VGAM1 HOST TARGET RNA, which host target binding site corresponds to a host target binding site such as BINDING SITE 1, BINDING SITE II or BINDING SITE III of FIG. 1, thereby inhibiting translation of VGAM268 host target RNA, herein schematically represented by VGAM1 HOST TARGET RNA into VGAM268 host target protein, herein schematically represented by VGAM1 HOST TARGET PROTEIN, both of FIG. 1.

[5693] VGAM269 RNA, herein schematically represented by VGAM2 binds complimentarily to a host target binding site located in an untranslated region of VGAM269 host target RNA, herein schematically represented by VGAM2 HOST TARGET RNA, which host target binding site corresponds to a host target binding site such as BINDING SITE 1, BINDING SITE II or BINDING SITE III of FIG. 1, thereby inhibiting translation of VGAM269 host target RNA, herein schematically represented by VGAM2 HOST TARGET RNA into VGAM269 host target protein, herein schematically represented by VGAM2 HOST TARGET PROTEIN, both of FIG. 1.

[5694] VGAM270 RNA, herein schematically represented by VGAM3 binds complimentarily to a host target binding site located in an untranslated region of VGAM270 host target RNA, herein schematically represented by VGAM3 HOST TARGET RNA, which host target binding site corresponds to a host target binding site such as BINDING SITE 1, BINDING SITE II or BINDING SITE III of FIG. 1, thereby inhibiting translation of VGAM270 host target RNA, herein schematically represented by VGAM3 HOST TARGET RNA into VGAM270 host target protein, herein schematically represented by VGAM3 HOST TARGET PROTEIN, both of FIG. 1.

[5695] It is appreciated that a function of VGR423 gene, herein designated VGR GENE, is inhibition of expression of host target genes, as part of a novel viral mechanism of attacking a host. Accordingly, utilities of VGR423 gene include diagnosis, prevention and treatment of viral infection by. Specific functions, and accordingly utilities, of VGR423 gene, herein designated VGR GENE, correlate with, and may be deduced from, the identity of the host target genes, which are inhibited by VGAM RNAs comprised in the operon-like cluster of VGR423 gene: VGAM268 host target protein, VGAM269 host target protein and VGAM270 host target protein, herein schematically represented by VGAM1 HOST TARGET PROTEIN through VGAM HOST TARGET PROTEIN respectively. The function of these host target genes is elaborated hereinabove with reference to VGAM268, VGAM269 and VGAM270

[5696] FIG. 9 further provides a conceptual description of novel bioinformatically detected regulatory viral gene, referred to here as Viral Genomic Record 424(VGR424) viral gene, which encodes an operon-like cluster of novel viral micro RNA-like genes, each of which in turn modulates expression of at least one host target gene, the function and utility of which at least one host target gene is known in the art.

[5697] VGR424 gene, herein designated VGR GENE, is a novel bioinformatically detected regulatory, non protein coding, RNA viral gene. The method by which VGR424 gene was detected is described hereinabove with reference to FIGS. 6-15.

[5698] VGR424 gene encodes VGR424 precursor RNA, herein designated VGR PRECURSOR RNA, an RNA molecule, typically several hundred nucleotides long.

[5699] VGR424 precursor RNA folds spatially, forming VGR424 folded precursor RNA, herein designated VGR FOLDED PRECURSOR RNA. It is appreciated that VGR424 folded precursor RNA, herein designated VGR FOLDED PRECURSOR RNA, comprises a plurality of what is known in the art as hairpin structures. These hairpin structures are due to the fact that the nucleotide sequence of VGR424 precursor RNA comprises a plurality of segments, the first half of each such segment having a nucleotide sequence which is at least a partial inversed-reversed sequence of the second half thereof, as is well known in the art.

[5700] VGR424 folded precursor RNA, herein designated VGR FOLDED PRECURSOR RNA, is naturally processed by cellular enzymatic activity into at least 2 separate VGAM precursor RNAs, VGAM272 precursor RNA and VGAM273 precursor RNA, herein schematically represented by VGAM1 PRECURSOR and VGAM2 PRECURSOR respectively, each of which VGAM precursor RNAs being a hairpin shaped RNA segment, corresponding to VGAM PRECURSOR RNA of FIG. 8.

[5701] The above mentioned VGAM precursor RNAs are diced by DICER COMPLEX of FIG. 8, yielding respective short RNA segments of about 22 nucleotides in length, VGAM272 RNA and VGAM273 RNA respectively, herein schematically represented by VGAM1 RNA and VGAM2 RNA respectively, each of which VGAM RNAs corresponding to VGAM RNA of FIG. 8.

[5702] VGAM272 RNA, herein schematically represented by VGAM1 binds complimentarily to a host target binding site located in an untranslated region of VGAM272 host target RNA, herein schematically represented by VGAM1 HOST TARGET RNA, which host target binding site corresponds to a host target binding site such as BINDING SITE 1, BINDING SITE II or BINDING SITE III of FIG. 1, thereby inhibiting translation of VGAM272 host target RNA, herein schematically represented by VGAM1 HOST TARGET RNA into VGAM272 host target protein, herein schematically represented by VGAM1 HOST TARGET PROTEIN, both of FIG. 1.

[5703] VGAM273 RNA, herein schematically represented by VGAM2 binds complimentarily to a host target binding site located in an untranslated region of VGAM273 host target RNA, herein schematically represented by VGAM2 HOST TARGET RNA, which host target binding site corresponds to a host target binding site such as BINDING SITE 1, BINDING SITE II or BINDING SITE III of FIG. 1, thereby inhibiting translation of VGAM273 host target RNA, herein schematically represented by VGAM2 HOST TARGET RNA into VGAM273 host target protein, herein schematically represented by VGAM2 HOST TARGET PROTEIN, both of FIG. 1.

[5704] It is appreciated that a function of VGR424 gene, herein designated VGR GENE, is inhibition of expression of host target genes, as part of a novel viral mechanism of attacking a host. Accordingly, utilities of VGR424 gene include diagnosis, prevention and treatment of viral infection by. Specific functions, and accordingly utilities, of VGR424 gene, herein designated VGR GENE, correlate with, and may be deduced from, the identity of the host target genes, which are inhibited by VGAM RNAs comprised in the operon-like cluster of VGR424 gene: VGAM272 host target protein and VGAM273 host target protein, herein schematically represented by VGAM1 HOST TARGET PROTEIN and VGAM HOST TARGET PROTEIN respectively. The function of these host target genes is elaborated hereinabove with reference to VGAM272 and VGAM273

[5705] FIG. 9 further provides a conceptual description of novel bioinformatically detected regulatory viral gene, referred to here as Viral Genomic Record 425(VGR425) viral gene, which encodes an operon-like cluster of novel viral micro RNA-like genes, each of which in turn modulates expression of at least one host target gene, the function and utility of which at least one host target gene is known in the art.

[5706] VGR425 gene, herein designated VGR GENE, is a novel bioinformatically detected regulatory, non protein coding, RNA viral gene. The method by which VGR425 gene was detected is described hereinabove with reference to FIGS. 6-15.

[5707] VGR425 gene encodes VGR425 precursor RNA, herein designated VGR PRECURSOR RNA, an RNA molecule, typically several hundred nucleotides long.

[5708] VGR425 precursor RNA folds spatially, forming VGR425 folded precursor RNA, herein designated VGR FOLDED PRECURSOR RNA. It is appreciated that VGR425 folded precursor RNA, herein designated VGR FOLDED PRECURSOR RNA, comprises a plurality of what is known in the art as hairpin structures. These hairpin structures are due to the fact that the nucleotide sequence of VGR425 precursor RNA comprises a plurality of segments, the first half of each such segment having a nucleotide sequence which is at least a partial inversed-reversed sequence of the second half thereof, as is well known in the art.

[5709] VGR425 folded precursor RNA, herein designated VGR FOLDED PRECURSOR RNA, is naturally processed by cellular enzymatic activity into at least 4 separate VGAM precursor RNAs, VGAM274 precursor RNA, VGAM275 precursor RNA, VGAM276 precursor RNA and VGAM277 precursor RNA, herein schematically represented by VGAM1 PRECURSOR, VGAM2 PRECURSOR, VGAM3 PRECURSOR and VGAM4 PRECURSOR respectively, each of which VGAM precursor RNAs being a hairpin shaped RNA segment, corresponding to VGAM PRECURSOR RNA of FIG. 8.

[5710] The above mentioned VGAM precursor RNAs are diced by DICER COMPLEX of FIG. 8, yielding respective short RNA segments of about 22 nucleotides in length, VGAM274 RNA, VGAM275 RNA, VGAM276 RNA and VGAM277 RNA respectively, herein schematically represented by VGAM1 RNA, VGAM2 RNA, VGAM3 RNA and VGAM4 RNA respectively, each of which VGAM RNAs corresponding to VGAM RNA of FIG. 8.

[5711] VGAM274 RNA, herein schematically represented by VGAM1 binds complimentarily to a host target binding site located in an untranslated region of VGAM274 host target RNA, herein schematically represented by VGAM1 HOST TARGET RNA, which host target binding site corresponds to a host target binding site such as BINDING SITE 1, BINDING SITE II or BINDING SITE III of FIG. 1, thereby inhibiting translation of VGAM274 host target RNA, herein schematically represented by VGAM1 HOST TARGET RNA into VGAM274 host target protein, herein schematically represented by VGAM1 HOST TARGET PROTEIN, both of FIG. 1.

[5712] VGAM275 RNA, herein schematically represented by VGAM2 binds complimentarily to a host target binding site located in an untranslated region of VGAM275 host target RNA, herein schematically represented by VGAM2 HOST TARGET RNA, which host target binding site corresponds to a host target binding site such as BINDING SITE I, BINDING SITE II or BINDING SITE III of FIG. 1, thereby inhibiting translation of VGAM275 host target RNA, herein schematically represented by VGAM2 HOST TARGET RNA into VGAM275 host target protein, herein schematically represented by VGAM2 HOST TARGET PROTEIN, both of FIG. 1.

[5713] VGAM276 RNA, herein schematically represented by VGAM3 binds complimentarily to a host target binding site located in an untranslated region of VGAM276 host target RNA, herein schematically represented by VGAM3 HOST TARGET RNA, which host target binding site corresponds to a host target binding site such as BINDING SITE I, BINDING SITE II or BINDING SITE III of FIG. 1, thereby inhibiting translation of VGAM276 host target RNA, herein schematically represented by VGAM3 HOST TARGET RNA into VGAM276 host target protein, herein schematically represented by VGAM3 HOST TARGET PROTEIN, both of FIG. 1.

[5714] VGAM277 RNA, herein schematically represented by VGAM4 binds complimentarily to a host target binding site located in an untranslated region of VGAM277 host target RNA, herein schematically represented by VGAM4 HOST TARGET RNA, which host target binding site corresponds to a host target binding site such as BINDING SITE 1, BINDING SITE II or BINDING SITE III of FIG. 1, thereby inhibiting translation of VGAM277 host target RNA, herein schematically represented by VGAM4 HOST TARGET RNA into VGAM277 host target protein, herein schematically represented by VGAM4 HOST TARGET PROTEIN, both of FIG. 1.

[5715] It is appreciated that a function of VGR425 gene, herein designated VGR GENE, is inhibition of expression of host target genes, as part of a novel viral mechanism of attacking a host. Accordingly, utilities of VGR425 gene include diagnosis, prevention and treatment of viral infection by. Specific functions, and accordingly utilities, of VGR425 gene, herein designated VGR GENE, correlate with, and may be deduced from, the identity of the host target genes, which are inhibited by VGAM RNAs comprised in the operon-like cluster of VGR425 gene: VGAM274 host target protein, VGAM275 host target protein, VGAM276 host target protein and VGAM277 host target protein, herein schematically represented by VGAM1 HOST TARGET PROTEIN through VGAM HOST TARGET PROTEIN respectively. The function of these host target genes is elaborated hereinabove with reference to VGAM274, VGAM275, VGAM276 and VGAM277

[5716] FIG. 9 further provides a conceptual description of novel bioinformatically detected regulatory viral gene, referred to here as Viral Genomic Record 426(VGR426) viral gene, which encodes an operon-like cluster of novel viral micro RNA-like genes, each of which in turn modulates expression of at least one host target gene, the function and utility of which at least one host target gene is known in the art.

[5717] VGR426 gene, herein designated VGR GENE, is a novel bioinformatically detected regulatory, non protein coding, RNA viral gene. The method by which VGR426 gene was detected is described hereinabove with reference to FIGS. 6-15.

[5718] VGR426 gene encodes VGR426 precursor RNA, herein designated VGR PRECURSOR RNA, an RNA molecule, typically several hundred nucleotides long.

[5719] VGR426 precursor RNA folds spatially, forming VGR426 folded precursor RNA, herein designated VGR FOLDED PRECURSOR RNA. It is appreciated that VGR426 folded precursor RNA, herein designated VGR FOLDED PRECURSOR RNA, comprises a plurality of what is known in the art as hairpin structures. These hairpin structures are due to the fact that the nucleotide sequence of VGR426 precursor RNA comprises a plurality of segments, the first half of each such segment having a nucleotide sequence which is at least a partial inversed-reversed sequence of the second half thereof, as is well known in the art.

[5720] VGR426 folded precursor RNA, herein designated VGR FOLDED PRECURSOR RNA, is naturally processed by cellular enzymatic activity into at least 5 separate VGAM precursor RNAs, VGAM279 precursor RNA, VGAM280 precursor RNA, VGAM281 precursor RNA, VGAM282 precursor RNA and VGAM283 precursor RNA, herein schematically represented by VGAM1 PRECURSOR, VGAM2 PRECURSOR, VGAM3 PRECURSOR, VGAM4 PRECURSOR and VGAM5 PRECURSOR respectively, each of which VGAM precursor RNAs being a hairpin shaped RNA segment, corresponding to VGAM PRECURSOR RNA of FIG. 8.

[5721] The above mentioned VGAM precursor RNAs are diced by DICER COMPLEX of FIG. 8, yielding respective short RNA segments of about 22 nucleotides in length, VGAM279 RNA, VGAM280 RNA, VGAM281 RNA, VGAM282 RNA and VGAM283 RNA respectively, herein schematically represented by VGAM1 RNA, VGAM2 RNA, VGAM3 RNA, VGAM4 RNA and VGAM5 RNA respectively, each of which VGAM RNAs corresponding to VGAM RNA of FIG. 8.

[5722] VGAM279 RNA, herein schematically represented by VGAM1 binds complimentarily to a host target binding site located in an untranslated region of VGAM279 host target RNA, herein schematically represented by VGAM1 HOST TARGET RNA, which host target binding site corresponds to a host target binding site such as BINDING SITE I, BINDING SITE II or BINDING SITE III of FIG. 1, thereby inhibiting translation of VGAM279 host target RNA, herein schematically represented by VGAM1 HOST TARGET RNA into VGAM279 host target protein, herein schematically represented by VGAM1 HOST TARGET PROTEIN, both of FIG. 1.

[5723] VGAM280 RNA, herein schematically represented by VGAM2 binds complimentarily to a host target binding site located in an untranslated region of VGAM280 host target RNA, herein schematically represented by VGAM2 HOST TARGET RNA, which host target binding site corresponds to a host target binding site such as BINDING SITE I, BINDING SITE II or BINDING SITE III of FIG. 1, thereby inhibiting translation of VGAM280 host target RNA, herein schematically represented by VGAM2 HOST TARGET RNA into VGAM280 host target protein, herein schematically represented by VGAM2 HOST TARGET PROTEIN, both of FIG. 1.

[5724] VGAM281 RNA, herein schematically represented by VGAM3 binds complimentarily to a host target binding site located in an untranslated region of VGAM281 host target RNA, herein schematically represented by VGAM3 HOST TARGET RNA, which host target binding site corresponds to a host target binding site such as BINDING SITE I, BINDING SITE II or BINDING SITE III of FIG. 1, thereby inhibiting translation of VGAM281 host target RNA, herein schematically represented by VGAM3 HOST TARGET RNA into VGAM281 host target protein, herein schematically represented by VGAM3 HOST TARGET PROTEIN, both of FIG. 1.

[5725] VGAM282 RNA, herein schematically represented by VGAM4 binds complimentarily to a host target binding site located in an untranslated region of VGAM282 host target RNA, herein schematically represented by VGAM4 HOST TARGET RNA, which host target binding site corresponds to a host target binding site such as BINDING SITE 1, BINDING SITE II or BINDING SITE III of FIG. 1, thereby inhibiting translation of VGAM282 host target RNA, herein schematically represented by VGAM4 HOST TARGET RNA into VGAM282 host target protein, herein schematically represented by VGAM4 HOST TARGET PROTEIN, both of FIG. 1.

[5726] VGAM283 RNA, herein schematically represented by VGAM5 binds complimentarily to a host target binding site located in an untranslated region of VGAM283 host target RNA, herein schematically represented by VGAM5 HOST TARGET RNA, which host target binding site corresponds to a host target binding site such as BINDING SITE 1, BINDING SITE II or BINDING SITE III of FIG. 1, thereby inhibiting translation of VGAM283 host target RNA, herein schematically represented by VGAM5 HOST TARGET RNA into VGAM283 host target protein, herein schematically represented by VGAM5 HOST TARGET PROTEIN, both of FIG. 1.

[5727] It is appreciated that a function of VGR426 gene, herein designated VGR GENE, is inhibition of expression of host target genes, as part of a novel viral mechanism of attacking a host. Accordingly, utilities of VGR426 gene include diagnosis, prevention and treatment of viral infection by. Specific functions, and accordingly utilities, of VGR426 gene, herein designated VGR GENE, correlate with, and may be deduced from, the identity of the host target genes, which are inhibited by VGAM RNAs comprised in the operon-like cluster of VGR426 gene: VGAM279 host target protein, VGAM280 host target protein, VGAM281 host target protein, VGAM282 host target protein and VGAM283 host target protein, herein schematically represented by VGAM1 HOST TARGET PROTEIN through VGAM HOST TARGET PROTEIN respectively. The function of these host target genes is elaborated hereinabove with reference to VGAM279, VGAM280, VGAM281, VGAM282 and VGAM283

[5728] FIG. 9 further provides a conceptual description of novel bioinformatically detected regulatory viral gene, referred to here as Viral Genomic Record 427(VGR427) viral gene, which encodes an operon-like cluster of novel viral micro RNA-like genes, each of which in turn modulates expression of at least one host target gene, the function and utility of which at least one host target gene is known in the art.

[5729] VGR427 gene, herein designated VGR GENE, is a novel bioinformatically detected regulatory, non protein coding, RNA viral gene. The method by which VGR427 gene was detected is described hereinabove with reference to FIGS. 6-15.

[5730] VGR427 gene encodes VGR427 precursor RNA, herein designated VGR PRECURSOR RNA, an RNA molecule, typically several hundred nucleotides long.

[5731] VGR427 precursor RNA folds spatially, forming VGR427 folded precursor RNA, herein designated VGR FOLDED PRECURSOR RNA. It is appreciated that VGR427 folded precursor RNA, herein designated VGR FOLDED PRECURSOR RNA, comprises a plurality of what is known in the art as hairpin structures. These hairpin structures are due to the fact that the nucleotide sequence of VGR427 precursor RNA comprises a plurality of segments, the first half of each such segment having a nucleotide sequence which is at least a partial inversed-reversed sequence of the second half thereof, as is well known in the art.

[5732] VGR427 folded precursor RNA, herein designated VGR FOLDED PRECURSOR RNA, is naturally processed by cellular enzymatic activity into at least 4 separate VGAM precursor RNAs, VGAM288 precursor RNA, VGAM289 precursor RNA, VGAM290 precursor RNA and VGAM291 precursor RNA, herein schematically represented by VGAM1 PRECURSOR, VGAM2 PRECURSOR, VGAM3 PRECURSOR and VGAM4 PRECURSOR respectively, each of which VGAM precursor RNAs being a hairpin shaped RNA segment, corresponding to VGAM PRECURSOR RNA of FIG. 8.

[5733] The above mentioned VGAM precursor RNAs are diced by DICER COMPLEX of FIG. 8, yielding respective short RNA segments of about 22 nucleotides in length, VGAM288 RNA, VGAM289 RNA, VGAM290 RNA and VGAM291 RNA respectively, herein schematically represented by VGAM1 RNA, VGAM2 RNA, VGAM3 RNA and VGAM4 RNA respectively, each of which VGAM RNAs corresponding to VGAM RNA of FIG. 8.

[5734] VGAM288 RNA, herein schematically represented by VGAM1 binds complimentarily to a host target binding site located in an untranslated region of VGAM288 host target RNA, herein schematically represented by VGAM1 HOST TARGET RNA, which host target binding site corresponds to a host target binding site such as BINDING SITE I, BINDING SITE II or BINDING SITE III of FIG. 1, thereby inhibiting translation of VGAM288 host target RNA, herein schematically represented by VGAM1 HOST TARGET RNA into VGAM288 host target protein, herein schematically represented by VGAM1 HOST TARGET PROTEIN, both of FIG. 1.

[5735] VGAM289 RNA, herein schematically represented by VGAM2 binds complimentarily to a host target binding site located in an untranslated region of VGAM289 host target RNA, herein schematically represented by VGAM2 HOST TARGET RNA, which host target binding site corresponds to a host target binding site such as BINDING SITE 1, BINDING SITE II or BINDING SITE III of FIG. 1, thereby inhibiting translation of VGAM289 host target RNA, herein schematically represented by VGAM2 HOST TARGET RNA into VGAM289 host target protein, herein schematically represented by VGAM2 HOST TARGET PROTEIN, both of FIG. 1.

[5736] VGAM290 RNA, herein schematically represented by VGAM3 binds complimentarily to a host target binding site located in an untranslated region of VGAM290 host target RNA, herein schematically represented by VGAM3 HOST TARGET RNA, which host target binding site corresponds to a host target binding site such as BINDING SITE 1, BINDING SITE II or BINDING SITE III of FIG. 1, thereby inhibiting translation of VGAM290 host target RNA, herein schematically represented by VGAM3 HOST TARGET RNA into VGAM290 host target protein, herein schematically represented by VGAM3 HOST TARGET PROTEIN, both of FIG. 1.

[5737] VGAM291 RNA, herein schematically represented by VGAM4 binds complimentarily to a host target binding site located in an untranslated region of VGAM291 host target RNA, herein schematically represented by VGAM4 HOST TARGET RNA, which host target binding site corresponds to a host target binding site such as BINDING SITE I, BINDING SITE II or BINDING SITE III of FIG. 1, thereby inhibiting translation of VGAM291 host target RNA, herein schematically represented by VGAM4 HOST TARGET RNA into VGAM291 host target protein, herein schematically represented by VGAM4 HOST TARGET PROTEIN, both of FIG. 1.

[5738] It is appreciated that a function of VGR427 gene, herein designated VGR GENE, is inhibition of expression of host target genes, as part of a novel viral mechanism of attacking a host. Accordingly, utilities of VGR427 gene include diagnosis, prevention and treatment of viral infection by. Specific functions, and accordingly utilities, of VGR427 gene, herein designated VGR GENE, correlate with, and may be deduced from, the identity of the host target genes, which are inhibited by VGAM RNAs comprised in the operon-like cluster of VGR427 gene: VGAM288 host target protein, VGAM289 host target protein, VGAM290 host target protein and VGAM291 host target protein, herein schematically represented by VGAM1 HOST TARGET PROTEIN through VGAM HOST TARGET PROTEIN respectively. The function of these host target genes is elaborated hereinabove with reference to VGAM288, VGAM289, VGAM290 and VGAM291

[5739] FIG. 9 further provides a conceptual description of novel bioinformatically detected regulatory viral gene, referred to here as Viral Genomic Record 428(VGR428) viral gene, which encodes an operon-like cluster of novel viral micro RNA-like genes, each of which in turn modulates expression of at least one host target gene, the function and utility of which at least one host target gene is known in the art.

[5740] VGR428 gene, herein designated VGR GENE, is a novel bioinformatically detected regulatory, non protein coding, RNA viral gene. The method by which VGR428 gene was detected is described hereinabove with reference to FIGS. 6-15.

[5741] VGR428 gene encodes VGR428 precursor RNA, herein designated VGR PRECURSOR RNA, an RNA molecule, typically several hundred nucleotides long.

[5742] VGR428 precursor RNA folds spatially, forming VGR428 folded precursor RNA, herein designated VGR FOLDED PRECURSOR RNA. It is appreciated that VGR428 folded precursor RNA, herein designated VGR FOLDED PRECURSOR RNA, comprises a plurality of what is known in the art as hairpin structures. These hairpin structures are due to the fact that the nucleotide sequence of VGR428 precursor RNA comprises a plurality of segments, the first half of each such segment having a nucleotide sequence which is at least a partial inversed-reversed sequence of the second half thereof, as is well known in the art.

[5743] VGR428 folded precursor RNA, herein designated VGR FOLDED PRECURSOR RNA, is naturally processed by cellular enzymatic activity into at least 3 separate VGAM precursor RNAs, VGAM292 precursor RNA, VGAM293 precursor RNA and VGAM294 precursor RNA, herein schematically represented by VGAM1 PRECURSOR, VGAM2 PRECURSOR and VGAM3 PRECURSOR respectively, each of which VGAM precursor RNAs being a hairpin shaped RNA segment, corresponding to VGAM PRECURSOR RNA of FIG. 8.

[5744] The above mentioned VGAM precursor RNAs are diced by DICER COMPLEX of FIG. 8, yielding respective short RNA segments of about 22 nucleotides in length, VGAM292 RNA, VGAM293 RNA and VGAM294 RNA respectively, herein schematically represented by VGAM1 RNA, VGAM2 RNA and VGAM3 RNA respectively, each of which VGAM RNAs corresponding to VGAM RNA of FIG. 8.

[5745] VGAM292 RNA, herein schematically represented by VGAM1 binds complimentarily to a host target binding site located in an untranslated region of VGAM292 host target RNA, herein schematically represented by VGAM1 HOST TARGET RNA, which host target binding site corresponds to a host target binding site such as BINDING SITE 1, BINDING SITE II or BINDING SITE III of FIG. 1, thereby inhibiting translation of VGAM292 host target RNA, herein schematically represented by VGAM1 HOST TARGET RNA into VGAM292 host target protein, herein schematically represented by VGAM1 HOST TARGET PROTEIN, both of FIG. 1.

[5746] VGAM293 RNA, herein schematically represented by VGAM2 binds complimentarily to a host target binding site located in an untranslated region of VGAM293 host target RNA, herein schematically represented by VGAM2 HOST TARGET RNA, which host target binding site corresponds to a host target binding site such as BINDING SITE 1, BINDING SITE II or BINDING SITE III of FIG. 1, thereby inhibiting translation of VGAM293 host target RNA, herein schematically represented by VGAM2 HOST TARGET RNA into VGAM293 host target protein, herein schematically represented by VGAM2 HOST TARGET PROTEIN, both of FIG. 1.

[5747] VGAM294 RNA, herein schematically represented by VGAM3 binds complimentarily to a host target binding site located in an untranslated region of VGAM294 host target RNA, herein schematically represented by VGAM3 HOST TARGET RNA, which host target binding site corresponds to a host target binding site such as BINDING SITE 1, BINDING SITE II or BINDING SITE III of FIG. 1, thereby inhibiting translation of VGAM294 host target RNA, herein schematically represented by VGAM3 HOST TARGET RNA into VGAM294 host target protein, herein schematically represented by VGAM3 HOST TARGET PROTEIN, both of FIG. 1.

[5748] It is appreciated that a function of VGR428 gene, herein designated VGR GENE, is inhibition of expression of host target genes, as part of a novel viral mechanism of attacking a host. Accordingly, utilities of VGR428 gene include diagnosis, prevention and treatment of viral infection by. Specific functions, and accordingly utilities, of VGR428 gene, herein designated VGR GENE, correlate with, and may be deduced from, the identity of the host target genes, which are inhibited by VGAM RNAs comprised in the operon-like cluster of VGR428 gene: VGAM292 host target protein, VGAM293 host target protein and VGAM294 host target protein, herein schematically represented by VGAM1 HOST TARGET PROTEIN through VGAM HOST TARGET PROTEIN respectively. The function of these host target genes is elaborated hereinabove with reference to VGAM292, VGAM293 and VGAM294

[5749] FIG. 9 further provides a conceptual description of novel bioinformatically detected regulatory viral gene, referred to here as Viral Genomic Record 429(VGR429) viral gene, which encodes an operon-like cluster of novel viral micro RNA-like genes, each of which in turn modulates expression of at least one host target gene, the function and utility of which at least one host target gene is known in the art.

[5750] VGR429 gene, herein designated VGR GENE, is a novel bioinformatically detected regulatory, non protein coding, RNA viral gene. The method by which VGR429 gene was detected is described hereinabove with reference to FIGS. 6-15.

[5751] VGR429 gene encodes VGR429 precursor RNA, herein designated VGR PRECURSOR RNA, an RNA molecule, typically several hundred nucleotides long.

[5752] VGR429 precursor RNA folds spatially, forming VGR429 folded precursor RNA, herein designated VGR FOLDED PRECURSOR RNA. It is appreciated that VGR429 folded precursor RNA, herein designated VGR FOLDED PRECURSOR RNA, comprises a plurality of what is known in the art as hairpin structures. These hairpin structures are due to the fact that the nucleotide sequence of VGR429 precursor RNA comprises a plurality of segments, the first half of each such segment having a nucleotide sequence which is at least a partial inversed-reversed sequence of the second half thereof, as is well known in the art.

[5753] VGR429 folded precursor RNA, herein designated VGR FOLDED PRECURSOR RNA, is naturally processed by cellular enzymatic activity into at least 6 separate VGAM precursor RNAs, VGAM295 precursor RNA, VGAM296 precursor RNA, VGAM297 precursor RNA, VGAM298 precursor RNA, VGAM299 precursor RNA and VGAM300 precursor RNA, herein schematically represented by VGAM1 PRECURSOR, VGAM2 PRECURSOR, VGAM3 PRECURSOR, VGAM4 PRECURSOR, VGAM5 PRECURSOR and VGAM6 PRECURSOR respectively, each of which VGAM precursor RNAs being a hairpin shaped RNA segment, corresponding to VGAM PRECURSOR RNA of FIG. 8.

[5754] The above mentioned VGAM precursor RNAs are diced by DICER COMPLEX of FIG. 8, yielding respective short RNA segments of about 22 nucleotides in length, VGAM295 RNA, VGAM296 RNA, VGAM297 RNA, VGAM298 RNA, VGAM299 RNA and VGAM300 RNA respectively, herein schematically represented by VGAM1 RNA, VGAM2 RNA, VGAM3 RNA, VGAM4 RNA, VGAM5 RNA and VGAM6 RNA respectively, each of which VGAM RNAs corresponding to VGAM RNA of FIG. 8.

[5755] VGAM295 RNA, herein schematically represented by VGAM1 binds complimentarily to a host target binding site located in an untranslated region of VGAM295 host target RNA, herein schematically represented by VGAM1 HOST TARGET RNA, which host target binding site corresponds to a host target binding site such as BINDING SITE 1, BINDING SITE II or BINDING SITE III of FIG. 1, thereby inhibiting translation of VGAM295 host target RNA, herein schematically represented by VGAM1 HOST TARGET RNA into VGAM295 host target protein, herein schematically represented by VGAM1 HOST TARGET PROTEIN, both of FIG. 1.

[5756] VGAM296 RNA, herein schematically represented by VGAM2 binds complimentarily to a host target binding site located in an untranslated region of VGAM296 host target RNA, herein schematically represented by VGAM2 HOST TARGET RNA, which host target binding site corresponds to a host target binding site such as BINDING SITE 1, BINDING SITE II or BINDING SITE III of FIG. 1, thereby inhibiting translation of VGAM296 host target RNA, herein schematically represented by VGAM2 HOST TARGET RNA into VGAM296 host target protein, herein schematically represented by VGAM2 HOST TARGET PROTEIN, both of FIG. 1.

[5757] VGAM297 RNA, herein schematically represented by VGAM3 binds complimentarily to a host target binding site located in an untranslated region of VGAM297 host target RNA, herein schematically represented by VGAM3 HOST TARGET RNA, which host target binding site corresponds to a host target binding site such as BINDING SITE 1, BINDING SITE II or BINDING SITE III of FIG. 1, thereby inhibiting translation of VGAM297 host target RNA, herein schematically represented by VGAM3 HOST TARGET RNA into VGAM297 host target protein, herein schematically represented by VGAM3 HOST TARGET PROTEIN, both of FIG. 1.

[5758] VGAM298 RNA, herein schematically represented by VGAM4 binds complimentarily to a host target binding site located in an untranslated region of VGAM298 host target RNA, herein schematically represented by VGAM4 HOST TARGET RNA, which host target binding site corresponds to a host target binding site such as BINDING SITE 1, BINDING SITE II or BINDING SITE III of FIG. 1, thereby inhibiting translation of VGAM298 host target RNA, herein schematically represented by VGAM4 HOST TARGET RNA into VGAM298 host target protein, herein schematically represented by VGAM4 HOST TARGET PROTEIN, both of FIG. 1.

[5759] VGAM299 RNA, herein schematically represented by VGAM5 binds complimentarily to a host target binding site located in an untranslated region of VGAM299 host target RNA, herein schematically represented by VGAM5 HOST TARGET RNA, which host target binding site corresponds to a host target binding site such as BINDING SITE 1, BINDING SITE II or BINDING SITE III of FIG. 1, thereby inhibiting translation of VGAM299 host target RNA, herein schematically represented by VGAM5 HOST TARGET RNA into VGAM299 host target protein, herein schematically represented by VGAM5 HOST TARGET PROTEIN, both of FIG. 1.

[5760] VGAM300 RNA, herein schematically represented by VGAM6 binds complimentarily to a host target binding site located in an untranslated region of VGAM300 host target RNA, herein schematically represented by VGAM6 HOST TARGET RNA, which host target binding site corresponds to a host target binding site such as BINDING SITE 1, BINDING SITE II or BINDING SITE III of FIG. 1, thereby inhibiting translation of VGAM300 host target RNA, herein schematically represented by VGAM6 HOST TARGET RNA into VGAM300 host target protein, herein schematically represented by VGAM6 HOST TARGET PROTEIN, both of FIG. 1.

[5761] It is appreciated that a function of VGR429 gene, herein designated VGR GENE, is inhibition of expression of host target genes, as part of a novel viral mechanism of attacking a host. Accordingly, utilities of VGR429 gene include diagnosis, prevention and treatment of viral infection by. Specific functions, and accordingly utilities, of VGR429 gene, herein designated VGR GENE, correlate with, and may be deduced from, the identity of the host target genes, which are inhibited by VGAM RNAs comprised in the operon-like cluster of VGR429 gene: VGAM295 host target protein, VGAM296 host target protein, VGAM297 host target protein, VGAM298 host target protein, VGAM299 host target protein and VGAM300 host target protein, herein schematically represented by VGAM1 HOST TARGET PROTEIN through VGAM HOST TARGET PROTEIN respectively. The function of these host target genes is elaborated hereinabove with reference to VGAM295, VGAM296, VGAM297, VGAM298, VGAM299 and VGAM300

[5762] FIG. 9 further provides a conceptual description of novel bioinformatically detected regulatory viral gene, referred to here as Viral Genomic Record 430(VGR430) viral gene, which encodes an operon-like cluster of novel viral micro RNA-like genes, each of which in turn modulates expression of at least one host target gene, the function and utility of which at least one host target gene is known in the art.

[5763] VGR430 gene, herein designated VGR GENE, is a novel bioinformatically detected regulatory, non protein coding, RNA viral gene. The method by which VGR430 gene was detected is described hereinabove with reference to FIGS. 6-15.

[5764] VGR430 gene encodes VGR430 precursor RNA, herein designated VGR PRECURSOR RNA, an RNA molecule, typically several hundred nucleotides long.

[5765] VGR430 precursor RNA folds spatially, forming VGR430 folded precursor RNA, herein designated VGR FOLDED PRECURSOR RNA. It is appreciated that VGR430 folded precursor RNA, herein designated VGR FOLDED PRECURSOR RNA, comprises a plurality of what is known in the art as hairpin structures. These hairpin structures are due to the fact that the nucleotide sequence of VGR430 precursor RNA comprises a plurality of segments, the first half of each such segment having a nucleotide sequence which is at least a partial inversed-reversed sequence of the second half thereof, as is well known in the art.

[5766] VGR430 folded precursor RNA, herein designated VGR FOLDED PRECURSOR RNA, is naturally processed by cellular enzymatic activity into at least 8 separate VGAM precursor RNAs, VGAM303 precursor RNA, VGAM304 precursor RNA, VGAM305 precursor RNA, VGAM306 precursor RNA, VGAM307 precursor RNA, VGAM308 precursor RNA, VGAM309 precursor RNA and VGAM310 precursor RNA, herein schematically represented by VGAM1 PRECURSOR, VGAM2 PRECURSOR, VGAM3 PRECURSOR, VGAM4 PRECURSOR, VGAM5 PRECURSOR, VGAM6 PRECURSOR, VGAM7 PRECURSOR and VGAM8 PRECURSOR respectively, each of which VGAM precursor RNAs being a hairpin shaped RNA segment, corresponding to VGAM PRECURSOR RNA of FIG. 8.

[5767] The above mentioned VGAM precursor RNAs are diced by DICER COMPLEX of FIG. 8, yielding respective short RNA segments of about 22 nucleotides in length, VGAM303 RNA, VGAM304 RNA, VGAM305 RNA, VGAM306 RNA, VGAM307 RNA, VGAM308 RNA, VGAM309 RNA and VGAM310 RNA respectively, herein schematically represented by VGAM1 RNA, VGAM2 RNA, VGAM3 RNA, VGAM4 RNA, VGAM5 RNA, VGAM6 RNA, VGAM7 RNA and VGAM8 RNA respectively, each of which VGAM RNAs corresponding to VGAM RNA of FIG. 8.

[5768] VGAM303 RNA, herein schematically represented by VGAM1 binds complimentarily to a host target binding site located in an untranslated region of VGAM303 host target RNA, herein schematically represented by VGAM1 HOST TARGET RNA, which host target binding site corresponds to a host target binding site such as BINDING SITE 1, BINDING SITE II or BINDING SITE III of FIG. 1, thereby inhibiting translation of VGAM303 host target RNA, herein schematically represented by VGAM1 HOST TARGET RNA into VGAM303 host target protein, herein schematically represented by VGAM1 HOST TARGET PROTEIN, both of FIG. 1.

[5769] VGAM304 RNA, herein schematically represented by VGAM2 binds complimentarily to a host target binding site located in an untranslated region of VGAM304 host target RNA, herein schematically represented by VGAM2 HOST TARGET RNA, which host target binding site corresponds to a host target binding site such as BINDING SITE 1, BINDING SITE II or BINDING SITE III of FIG. 1, thereby inhibiting translation of VGAM304 host target RNA, herein schematically represented by VGAM2 HOST TARGET RNA into VGAM304 host target protein, herein schematically represented by VGAM2 HOST TARGET PROTEIN, both of FIG. 1.

[5770] VGAM305 RNA, herein schematically represented by VGAM3 binds complimentarily to a host target binding site located in an untranslated region of VGAM305 host target RNA, herein schematically represented by VGAM3 HOST TARGET RNA, which host target binding site corresponds to a host target binding site such as BINDING SITE I, BINDING SITE II or BINDING SITE III of FIG. 1, thereby inhibiting translation of VGAM305 host target RNA, herein schematically represented by VGAM3 HOST TARGET RNA into VGAM305 host target protein, herein schematically represented by VGAM3 HOST TARGET PROTEIN, both of FIG. 1.

[5771] VGAM306 RNA, herein schematically represented by VGAM4 binds complimentarily to a host target binding site located in an untranslated region of VGAM306 host target RNA, herein schematically represented by VGAM4 HOST TARGET RNA, which host target binding site corresponds to a host target binding site such as BINDING SITE I, BINDING SITE II or BINDING SITE III of FIG. 1, thereby inhibiting translation of VGAM306 host target RNA, herein schematically represented by VGAM4 HOST TARGET RNA into VGAM306 host target protein, herein schematically represented by VGAM4 HOST TARGET PROTEIN, both of FIG. 1.

[5772] VGAM307 RNA, herein schematically represented by VGAM5 binds complimentarily to a host target binding site located in an untranslated region of VGAM307 host target RNA, herein schematically represented by VGAM5 HOST TARGET RNA, which host target binding site corresponds to a host target binding site such as BINDING SITE 1, BINDING SITE II or BINDING SITE III of FIG. 1, thereby inhibiting translation of VGAM307 host target RNA, herein schematically represented by VGAM5 HOST TARGET RNA into VGAM307 host target protein, herein schematically represented by VGAM5 HOST TARGET PROTEIN, both of FIG. 1.

[5773] VGAM308 RNA, herein schematically represented by VGAM6 binds complimentarily to a host target binding site located in an untranslated region of VGAM308 host target RNA, herein schematically represented by VGAM6 HOST TARGET RNA, which host target binding site corresponds to a host target binding site such as BINDING SITE 1, BINDING SITE II or BINDING SITE III of FIG. 1, thereby inhibiting translation of VGAM308 host target RNA, herein schematically represented by VGAM6 HOST TARGET RNA into VGAM308 host target protein, herein schematically represented by VGAM6 HOST TARGET PROTEIN, both of FIG. 1.

[5774] VGAM309 RNA, herein schematically represented by VGAM7 binds complimentarily to a host target binding site located in an untranslated region of VGAM309 host target RNA, herein schematically represented by VGAM7 HOST TARGET RNA, which host target binding site corresponds to a host target binding site such as BINDING SITE I, BINDING SITE II or BINDING SITE III of FIG. 1, thereby inhibiting translation of VGAM309 host target RNA, herein schematically represented by VGAM7 HOST TARGET RNA into VGAM309 host target protein, herein schematically represented by VGAM7 HOST TARGET PROTEIN, both of FIG. 1.

[5775] VGAM310 RNA, herein schematically represented by VGAM8 binds complimentarily to a host target binding site located in an untranslated region of VGAM310 host target RNA, herein schematically represented by VGAM8 HOST TARGET RNA, which host target binding site corresponds to a host target binding site such as BINDING SITE I, BINDING SITE II or BINDING SITE III of FIG. 1, thereby inhibiting translation of VGAM310 host target RNA, herein schematically represented by VGAM8 HOST TARGET RNA into VGAM310 host target protein, herein schematically represented by VGAM8 HOST TARGET PROTEIN, both of FIG. 1.

[5776] It is appreciated that a function of VGR430 gene, herein designated VGR GENE, is inhibition of expression of host target genes, as part of a novel viral mechanism of attacking a host. Accordingly, utilities of VGR430 gene include diagnosis, prevention and treatment of viral infection by. Specific functions, and accordingly utilities, of VGR430 gene, herein designated VGR GENE, correlate with, and may be deduced from, the identity of the host target genes, which are inhibited by VGAM RNAs comprised in the operon-like cluster of VGR430 gene: VGAM303 host target protein, VGAM304 host target protein, VGAM305 host target protein, VGAM306 host target protein, VGAM307 host target protein, VGAM308 host target protein, VGAM309 host target protein and VGAM310 host target protein, herein schematically represented by VGAM1 HOST TARGET PROTEIN through VGAM HOST TARGET PROTEIN respectively. The function of these host target genes is elaborated hereinabove with reference to VGAM303, VGAM304, VGAM305, VGAM306, VGAM307, VGAM308, VGAM309 and VGAM310

[5777] FIG. 9 further provides a conceptual description of novel bioinformatically detected regulatory viral gene, referred to here as Viral Genomic Record 431(VGR431) viral gene, which encodes an operon-like cluster of novel viral micro RNA-like genes, each of which in turn modulates expression of at least one host target gene, the function and utility of which at least one host target gene is known in the art.

[5778] VGR431 gene, herein designated VGR GENE, is a novel bioinformatically detected regulatory, non protein coding, RNA viral gene. The method by which VGR431 gene was detected is described hereinabove with reference to FIGS. 6-15.

[5779] VGR431 gene encodes VGR431 precursor RNA, herein designated VGR PRECURSOR RNA, an RNA molecule, typically several hundred nucleotides long.

[5780] VGR431 precursor RNA folds spatially, forming VGR431 folded precursor RNA, herein designated VGR FOLDED PRECURSOR RNA. It is appreciated that VGR431 folded precursor RNA, herein designated VGR FOLDED PRECURSOR RNA, comprises a plurality of what is known in the art as hairpin structures. These hairpin structures are due to the fact that the nucleotide sequence of VGR431 precursor RNA comprises a plurality of segments, the first half of each such segment having a nucleotide sequence which is at least a partial inversed-reversed sequence of the second half thereof, as is well known in the art.

[5781] VGR431 folded precursor RNA, herein designated VGR FOLDED PRECURSOR RNA, is naturally processed by cellular enzymatic activity into at least 4 separate VGAM precursor RNAs, VGAM311 precursor RNA, VGAM312 precursor RNA, VGAM313 precursor RNA and VGAM314 precursor RNA, herein schematically represented by VGAM1 PRECURSOR, VGAM2 PRECURSOR, VGAM3 PRECURSOR and VGAM4 PRECURSOR respectively, each of which VGAM precursor RNAs being a hairpin shaped RNA segment, corresponding to VGAM PRECURSOR RNA of FIG. 8.

[5782] The above mentioned VGAM precursor RNAs are diced by DICER COMPLEX of FIG. 8, yielding respective short RNA segments of about 22 nucleotides in length, VGAM311 RNA, VGAM312 RNA, VGAM313 RNA and VGAM314 RNA respectively, herein schematically represented by VGAM1 RNA, VGAM2 RNA, VGAM3 RNA and VGAM4 RNA respectively, each of which VGAM RNAs corresponding to VGAM RNA of FIG. 8.

[5783] VGAM311 RNA, herein schematically represented by VGAM1 binds complimentarily to a host target binding site located in an untranslated region of VGAM311 host target RNA, herein schematically represented by VGAM1 HOST TARGET RNA, which host target binding site corresponds to a host target binding site such as BINDING SITE I, BINDING SITE II or BINDING SITE III of FIG. 1, thereby inhibiting translation of VGAM311 host target RNA, herein schematically represented by VGAM1 HOST TARGET RNA into VGAM311 host target protein, herein schematically represented by VGAM1 HOST TARGET PROTEIN, both of FIG. 1.

[5784] VGAM312 RNA, herein schematically represented by VGAM2 binds complimentarily to a host target binding site located in an untranslated region of VGAM312 host target RNA, herein schematically represented by VGAM2 HOST TARGET RNA, which host target binding site corresponds to a host target binding site such as BINDING SITE I, BINDING SITE II or BINDING SITE III of FIG. 1, thereby inhibiting translation of VGAM312 host target RNA, herein schematically represented by VGAM2 HOST TARGET RNA into VGAM312 host target protein, herein schematically represented by VGAM2 HOST TARGET PROTEIN, both of FIG. 1.

[5785] VGAM313 RNA, herein schematically represented by VGAM3 binds complimentarily to a host target binding site located in an untranslated region of VGAM313 host target RNA, herein schematically represented by VGAM3 HOST TARGET RNA, which host target binding site corresponds to a host target binding site such as BINDING SITE I, BINDING SITE II or BINDING SITE III of FIG. 1, thereby inhibiting translation of VGAM313 host target RNA, herein schematically represented by VGAM3 HOST TARGET RNA into VGAM313 host target protein, herein schematically represented by VGAM3 HOST TARGET PROTEIN, both of FIG. 1.

[5786] VGAM314 RNA, herein schematically represented by VGAM4 binds complimentarily to a host target binding site located in an untranslated region of VGAM314 host target RNA, herein schematically represented by VGAM4 HOST TARGET RNA, which host target binding site corresponds to a host target binding site such as BINDING SITE I, BINDING SITE II or BINDING SITE III of FIG. 1, thereby inhibiting translation of VGAM314 host target RNA, herein schematically represented by VGAM4 HOST TARGET RNA into VGAM314 host target protein, herein schematically represented by VGAM4 HOST TARGET PROTEIN, both of FIG. 1.

[5787] It is appreciated that a function of VGR431 gene, herein designated VGR GENE, is inhibition of expression of host target genes, as part of a novel viral mechanism of attacking a host. Accordingly, utilities of VGR431 gene include diagnosis, prevention and treatment of viral infection by. Specific functions, and accordingly utilities, of VGR431 gene, herein designated VGR GENE, correlate with, and may be deduced from, the identity of the host target genes, which are inhibited by VGAM RNAs comprised in the operon-like cluster of VGR431 gene: VGAM311 host target protein, VGAM312 host target protein, VGAM313 host target protein and VGAM314 host target protein, herein schematically represented by VGAM1 HOST TARGET PROTEIN through VGAM HOST TARGET PROTEIN respectively. The function of these host target genes is elaborated hereinabove with reference to VGAM311, VGAM312, VGAM313 and VGAM314

[5788] FIG. 9 further provides a conceptual description of novel bioinformatically detected regulatory viral gene, referred to here as Viral Genomic Record 432(VGR432) viral gene, which encodes an operon-like cluster of novel viral micro RNA-like genes, each of which in turn modulates expression of at least one host target gene, the function and utility of which at least one host target gene is known in the art.

[5789] VGR432 gene, herein designated VGR GENE, is a novel bioinformatically detected regulatory, non protein coding, RNA viral gene. The method by which VGR432 gene was detected is described hereinabove with reference to FIGS. 6-15.

[5790] VGR432 gene encodes VGR432 precursor RNA, herein designated VGR PRECURSOR RNA, an RNA molecule, typically several hundred nucleotides long.

[5791] VGR432 precursor RNA folds spatially, forming VGR432 folded precursor RNA, herein designated VGR FOLDED PRECURSOR RNA. It is appreciated that VGR432 folded precursor RNA, herein designated VGR FOLDED PRECURSOR RNA, comprises a plurality of what is known in the art as hairpin structures. These hairpin structures are due to the fact that the nucleotide sequence of VGR432 precursor RNA comprises a plurality of segments, the first half of each such segment having a nucleotide sequence which is at least a partial inversed-reversed sequence of the second half thereof, as is well known in the art.

[5792] VGR432 folded precursor RNA, herein designated VGR FOLDED PRECURSOR RNA, is naturally processed by cellular enzymatic activity into at least 4 separate VGAM precursor RNAs, VGAM316 precursor RNA, VGAM317 precursor RNA, VGAM318 precursor RNA and VGAM319 precursor RNA, herein schematically represented by VGAM1 PRECURSOR, VGAM2 PRECURSOR, VGAM3 PRECURSOR and VGAM4 PRECURSOR respectively, each of which VGAM precursor RNAs being a hairpin shaped RNA segment, corresponding to VGAM PRECURSOR RNA of FIG. 8.

[5793] The above mentioned VGAM precursor RNAs are diced by DICER COMPLEX of FIG. 8, yielding respective short RNA segments of about 22 nucleotides in length, VGAM316 RNA, VGAM317 RNA, VGAM318 RNA and VGAM319 RNA respectively, herein schematically represented by VGAM1 RNA, VGAM2 RNA, VGAM3 RNA and VGAM4 RNA respectively, each of which VGAM RNAs corresponding to VGAM RNA of FIG. 8.

[5794] VGAM316 RNA, herein schematically represented by VGAM1 binds complimentarily to a host target binding site located in an untranslated region of VGAM316 host target RNA, herein schematically represented by VGAM1 HOST TARGET RNA, which host target binding site corresponds to a host target binding site such as BINDING SITE I, BINDING SITE II or BINDING SITE III of FIG. 1, thereby inhibiting translation of VGAM316 host target RNA, herein schematically represented by VGAM1 HOST TARGET RNA into VGAM316 host target protein, herein schematically represented by VGAM1 HOST TARGET PROTEIN, both of FIG. 1.

[5795] VGAM317 RNA, herein schematically represented by VGAM2 binds complimentarily to a host target binding site located in an untranslated region of VGAM317 host target RNA, herein schematically represented by VGAM2 HOST TARGET RNA, which host target binding site corresponds to a host target binding site such as BINDING SITE I, BINDING SITE II or BINDING SITE III of FIG. 1, thereby inhibiting translation of VGAM317 host target RNA, herein schematically represented by VGAM2 HOST TARGET RNA into VGAM317 host target protein, herein schematically represented by VGAM2 HOST TARGET PROTEIN, both of FIG. 1.

[5796] VGAM318 RNA, herein schematically represented by VGAM3 binds complimentarily to a host target binding site located in an untranslated region of VGAM318 host target RNA, herein schematically represented by VGAM3 HOST TARGET RNA, which host target binding site corresponds to a host target binding site such as BINDING SITE I, BINDING SITE II or BINDING SITE III of FIG. 1, thereby inhibiting translation of VGAM318 host target RNA, herein schematically represented by VGAM3 HOST TARGET RNA into VGAM318 host target protein, herein schematically represented by VGAM3 HOST TARGET PROTEIN, both of FIG. 1.

[5797] VGAM319 RNA, herein schematically represented by VGAM4 binds complimentarily to a host target binding site located in an untranslated region of VGAM319 host target RNA, herein schematically represented by VGAM4 HOST TARGET RNA, which host target binding site corresponds to a host target binding site such as BINDING SITE I, BINDING SITE II or BINDING SITE III of FIG. 1, thereby inhibiting translation of VGAM319 host target RNA, herein schematically represented by VGAM4 HOST TARGET RNA into VGAM319 host target protein, herein schematically represented by VGAM4 HOST TARGET PROTEIN, both of FIG. 1.

[5798] It is appreciated that a function of VGR432 gene, herein designated VGR GENE, is inhibition of expression of host target genes, as part of a novel viral mechanism of attacking a host. Accordingly, utilities of VGR432 gene include diagnosis, prevention and treatment of viral infection by. Specific functions, and accordingly utilities, of VGR432 gene, herein designated VGR GENE, correlate with, and may be deduced from, the identity of the host target genes, which are inhibited by VGAM RNAs comprised in the operon-like cluster of VGR432 gene: VGAM316 host target protein, VGAM317 host target protein, VGAM318 host target protein and VGAM319 host target protein, herein schematically represented by VGAM1 HOST TARGET PROTEIN through VGAM HOST TARGET PROTEIN respectively. The function of these host target genes is elaborated hereinabove with reference to VGAM316, VGAM317, VGAM318 and VGAM319

[5799] FIG. 9 further provides a conceptual description of novel bioinformatically detected regulatory viral gene, referred to here as Viral Genomic Record 433(VGR433) viral gene, which encodes an operon-like cluster of novel viral micro RNA-like genes, each of which in turn modulates expression of at least one host target gene, the function and utility of which at least one host target gene is known in the art.

[5800] VGR433 gene, herein designated VGR GENE, is a novel bioinformatically detected regulatory, non protein coding, RNA viral gene. The method by which VGR433 gene was detected is described hereinabove with reference to FIGS. 6-15.

[5801] VGR433 gene encodes VGR433 precursor RNA, herein designated VGR PRECURSOR RNA, an RNA molecule, typically several hundred nucleotides long.

[5802] VGR433 precursor RNA folds spatially, forming VGR433 folded precursor RNA, herein designated VGR FOLDED PRECURSOR RNA. It is appreciated that VGR433 folded precursor RNA, herein designated VGR FOLDED PRECURSOR RNA, comprises a plurality of what is known in the art as hairpin structures. These hairpin structures are due to the fact that the nucleotide sequence of VGR433 precursor RNA comprises a plurality of segments, the first half of each such segment having a nucleotide sequence which is at least a partial inversed-reversed sequence of the second half thereof, as is well known in the art.

[5803] VGR433 folded precursor RNA, herein designated VGR FOLDED PRECURSOR RNA, is naturally processed by cellular enzymatic activity into at least 8 separate VGAM precursor RNAs, VGAM320 precursor RNA, VGAM321 precursor RNA, VGAM322 precursor RNA, VGAM323 precursor RNA, VGAM324 precursor RNA, VGAM325 precursor RNA, VGAM326 precursor RNA and VGAM327 precursor RNA, herein schematically represented by VGAM1 PRECURSOR, VGAM2 PRECURSOR, VGAM3 PRECURSOR, VGAM4 PRECURSOR, VGAM5 PRECURSOR, VGAM6 PRECURSOR, VGAM7 PRECURSOR and VGAM8 PRECURSOR respectively, each of which VGAM precursor RNAs being a hairpin shaped RNA segment, corresponding to VGAM PRECURSOR RNA of FIG. 8.

[5804] The above mentioned VGAM precursor RNAs are diced by DICER COMPLEX of FIG. 8, yielding respective short RNA segments of about 22 nucleotides in length, VGAM320 RNA, VGAM321 RNA, VGAM322 RNA, VGAM323 RNA, VGAM324 RNA, VGAM325 RNA, VGAM326 RNA and VGAM327 RNA respectively, herein schematically represented by VGAM1 RNA, VGAM2 RNA, VGAM3 RNA, VGAM4 RNA, VGAM5 RNA, VGAM6 RNA, VGAM7 RNA and VGAM8 RNA respectively, each of which VGAM RNAs corresponding to VGAM RNA of FIG. 8.

[5805] VGAM320 RNA, herein schematically represented by VGAM1 binds complimentarily to a host target binding site located in an untranslated region of VGAM320 host target RNA, herein schematically represented by VGAM1 HOST TARGET RNA, which host target binding site corresponds to a host target binding site such as BINDING SITE 1, BINDING SITE II or BINDING SITE III of FIG. 1, thereby inhibiting translation of VGAM320 host target RNA, herein schematically represented by VGAM1 HOST TARGET RNA into VGAM320 host target protein, herein schematically represented by VGAM1 HOST TARGET PROTEIN, both of FIG. 1.

[5806] VGAM321 RNA, herein schematically represented by VGAM2 binds complimentarily to a host target binding site located in an untranslated region of VGAM321 host target RNA, herein schematically represented by VGAM2 HOST TARGET RNA, which host target binding site corresponds to a host target binding site such as BINDING SITE I, BINDING SITE II or BINDING SITE III of FIG. 1, thereby inhibiting translation of VGAM321 host target RNA, herein schematically represented by VGAM2 HOST TARGET RNA into VGAM321 host target protein, herein schematically represented by VGAM2 HOST TARGET PROTEIN, both of FIG. 1.

[5807] VGAM322 RNA, herein schematically represented by VGAM3 binds complimentarily to a host target binding site located in an untranslated region of VGAM322 host target RNA, herein schematically represented by VGAM3 HOST TARGET RNA, which host target binding site corresponds to a host target binding site such as BINDING SITE I, BINDING SITE II or BINDING SITE III of FIG. 1, thereby inhibiting translation of VGAM322 host target RNA, herein schematically represented by VGAM3 HOST TARGET RNA into VGAM322 host target protein, herein schematically represented by VGAM3 HOST TARGET PROTEIN, both of FIG. 1.

[5808] VGAM323 RNA, herein schematically represented by VGAM4 binds complimentarily to a host target binding site located in an untranslated region of VGAM323 host target RNA, herein schematically represented by VGAM4 HOST TARGET RNA, which host target binding site corresponds to a host target binding site such as BINDING SITE 1, BINDING SITE II or BINDING SITE III of FIG. 1, thereby inhibiting translation of VGAM323 host target RNA, herein schematically represented by VGAM4 HOST TARGET RNA into VGAM323 host target protein, herein schematically represented by VGAM4 HOST TARGET PROTEIN, both of FIG. 1.

[5809] VGAM324 RNA, herein schematically represented by VGAM5 binds complimentarily to a host target binding site located in an untranslated region of VGAM324 host target RNA, herein schematically represented by VGAM5 HOST TARGET RNA, which host target binding site corresponds to a host target binding site such as BINDING SITE I, BINDING SITE II or BINDING SITE III of FIG. 1, thereby inhibiting translation of VGAM324 host target RNA, herein schematically represented by VGAM5 HOST TARGET RNA into VGAM324 host target protein, herein schematically represented by VGAM5 HOST TARGET PROTEIN, both of FIG. 1.

[5810] VGAM325 RNA, herein schematically represented by VGAM6 binds complimentarily to a host target binding site located in an untranslated region of VGAM325 host target RNA, herein schematically represented by VGAM6 HOST TARGET RNA, which host target binding site corresponds to a host target binding site such as BINDING SITE I, BINDING SITE II or BINDING SITE III of FIG. 1, thereby inhibiting translation of VGAM325 host target RNA, herein schematically represented by VGAM6 HOST TARGET RNA into VGAM325 host target protein, herein schematically represented by VGAM6 HOST TARGET PROTEIN, both of FIG. 1.

[5811] VGAM326 RNA, herein schematically represented by VGAM7 binds complimentarily to a host target binding site located in an untranslated region of VGAM326 host target RNA, herein schematically represented by VGAM7 HOST TARGET RNA, which host target binding site corresponds to a host target binding site such as BINDING SITE I, BINDING SITE II or BINDING SITE III of FIG. 1, thereby inhibiting translation of VGAM326 host target RNA, herein schematically represented by VGAM7 HOST TARGET RNA into VGAM326 host target protein, herein schematically represented by VGAM7 HOST TARGET PROTEIN, both of FIG. 1.

[5812] VGAM327 RNA, herein schematically represented by VGAM8 binds complimentarily to a host target binding site located in an untranslated region of VGAM327 host target RNA, herein schematically represented by VGAM8 HOST TARGET RNA, which host target binding site corresponds to a host target binding site such as BINDING SITE I, BINDING SITE II or BINDING SITE III of FIG. 1, thereby inhibiting translation of VGAM327 host target RNA, herein schematically represented by VGAM8 HOST TARGET RNA into VGAM327 host target protein, herein schematically represented by VGAM8 HOST TARGET PROTEIN, both of FIG. 1.

[5813] It is appreciated that a function of VGR433 gene, herein designated VGR GENE, is inhibition of expression of host target genes, as part of a novel viral mechanism of attacking a host. Accordingly, utilities of VGR433 gene include diagnosis, prevention and treatment of viral infection by. Specific functions, and accordingly utilities, of VGR433 gene, herein designated VGR GENE, correlate with, and may be deduced from, the identity of the host target genes, which are inhibited by VGAM RNAs comprised in the operon-like cluster of VGR433 gene: VGAM320 host target protein, VGAM321 host target protein, VGAM322 host target protein, VGAM323 host target protein, VGAM324 host target protein, VGAM325 host target protein, VGAM326 host target protein and VGAM327 host target protein, herein schematically represented by VGAM1 HOST TARGET PROTEIN through VGAM HOST TARGET PROTEIN respectively. The function of these host target genes is elaborated hereinabove with reference to VGAM320, VGAM321, VGAM322, VGAM323, VGAM324, VGAM325, VGAM326 and VGAM327

[5814] FIG. 9 further provides a conceptual description of novel bioinformatically detected regulatory viral gene, referred to here as Viral Genomic Record 434(VGR434) viral gene, which encodes an operon-like cluster of novel viral micro RNA-like genes, each of which in turn modulates expression of at least one host target gene, the function and utility of which at least one host target gene is known in the art.

[5815] VGR434 gene, herein designated VGR GENE, is a novel bioinformatically detected regulatory, non protein coding, RNA viral gene. The method by which VGR434 gene was detected is described hereinabove with reference to FIGS. 6-15.

[5816] VGR434 gene encodes VGR434 precursor RNA, herein designated VGR PRECURSOR RNA, an RNA molecule, typically several hundred nucleotides long.

[5817] VGR434 precursor RNA folds spatially, forming VGR434 folded precursor RNA, herein designated VGR FOLDED PRECURSOR RNA. It is appreciated that VGR434 folded precursor RNA, herein designated VGR FOLDED PRECURSOR RNA, comprises a plurality of what is known in the art as hairpin structures. These hairpin structures are due to the fact that the nucleotide sequence of VGR434 precursor RNA comprises a plurality of segments, the first half of each such segment having a nucleotide sequence which is at least a partial inversed-reversed sequence of the second half thereof, as is well known in the art.

[5818] VGR434 folded precursor RNA, herein designated VGR FOLDED PRECURSOR RNA, is naturally processed by cellular enzymatic activity into at least 8 separate VGAM precursor RNAs, VGAM328 precursor RNA, VGAM329 precursor RNA, VGAM330 precursor RNA, VGAM331 precursor RNA, VGAM332 precursor RNA, VGAM333 precursor RNA, VGAM334 precursor RNA and VGAM335 precursor RNA, herein schematically represented by VGAM1 PRECURSOR, VGAM2 PRECURSOR, VGAM3 PRECURSOR, VGAM4 PRECURSOR, VGAM5 PRECURSOR, VGAM6 PRECURSOR, VGAM7 PRECURSOR and VGAM8 PRECURSOR respectively, each of which VGAM precursor RNAs being a hairpin shaped RNA segment, corresponding to VGAM PRECURSOR RNA of FIG. 8.

[5819] The above mentioned VGAM precursor RNAs are diced by DICER COMPLEX of FIG. 8, yielding respective short RNA segments of about 22 nucleotides in length, VGAM328 RNA, VGAM329 RNA, VGAM330 RNA, VGAM331 RNA, VGAM332 RNA, VGAM333 RNA, VGAM334 RNA and VGAM335 RNA respectively, herein schematically represented by VGAM1 RNA, VGAM2 RNA, VGAM3 RNA, VGAM4 RNA, VGAM5 RNA, VGAM6 RNA, VGAM7 RNA and VGAM8 RNA respectively, each of which VGAM RNAs corresponding to VGAM RNA of FIG. 8.

[5820] VGAM328 RNA, herein schematically represented by VGAM1 binds complimentarily to a host target binding site located in an untranslated region of VGAM328 host target RNA, herein schematically represented by VGAM1 HOST TARGET RNA, which host target binding site corresponds to a host target binding site such as BINDING SITE I, BINDING SITE II or BINDING SITE III of FIG. 1, thereby inhibiting translation of VGAM328 host target RNA, herein schematically represented by VGAM1 HOST TARGET RNA into VGAM328 host target protein, herein schematically represented by VGAM1 HOST TARGET PROTEIN, both of FIG. 1.

[5821] VGAM329 RNA, herein schematically represented by VGAM2 binds complimentarily to a host target binding site located in an untranslated region of VGAM329 host target RNA, herein schematically represented by VGAM2 HOST TARGET RNA, which host target binding site corresponds to a host target binding site such as BINDING SITE I, BINDING SITE II or BINDING SITE III of FIG. 1, thereby inhibiting translation of VGAM329 host target RNA, herein schematically represented by VGAM2 HOST TARGET RNA into VGAM329 host target protein, herein schematically represented by VGAM2 HOST TARGET PROTEIN, both of FIG. 1.

[5822] VGAM330 RNA, herein schematically represented by VGAM3 binds complimentarily to a host target binding site located in an untranslated region of VGAM330 host target RNA, herein schematically represented by VGAM3 HOST TARGET RNA, which host target binding site corresponds to a host target binding site such as BINDING SITE I, BINDING SITE II or BINDING SITE III of FIG. 1, thereby inhibiting translation of VGAM330 host target RNA, herein schematically represented by VGAM3 HOST TARGET RNA into VGAM330 host target protein, herein schematically represented by VGAM3 HOST TARGET PROTEIN, both of FIG. 1.

[5823] VGAM331 RNA, herein schematically represented by VGAM4 binds complimentarily to a host target binding site located in an untranslated region of VGAM331 host target RNA, herein schematically represented by VGAM4 HOST TARGET RNA, which host target binding site corresponds to a host target binding site such as BINDING SITE I, BINDING SITE II or BINDING SITE III of FIG. 1, thereby inhibiting translation of VGAM331 host target RNA, herein schematically represented by VGAM4 HOST TARGET RNA into VGAM331 host target protein, herein schematically represented by VGAM4 HOST TARGET PROTEIN, both of FIG. 1.

[5824] VGAM332 RNA, herein schematically represented by VGAM5 binds complimentarily to a host target binding site located in an untranslated region of VGAM332 host target RNA, herein schematically represented by VGAM5 HOST TARGET RNA, which host target binding site corresponds to a host target binding site such as BINDING SITE 1, BINDING SITE II or BINDING SITE III of FIG. 1, thereby inhibiting translation of VGAM332 host target RNA, herein schematically represented by VGAM5 HOST TARGET RNA into VGAM332 host target protein, herein schematically represented by VGAM5 HOST TARGET PROTEIN, both of FIG. 1.

[5825] VGAM333 RNA, herein schematically represented by VGAM6 binds complimentarily to a host target binding site located in an untranslated region of VGAM333 host target RNA, herein schematically represented by VGAM6 HOST TARGET RNA, which host target binding site corresponds to a host target binding site such as BINDING SITE 1, BINDING SITE II or BINDING SITE III of FIG. 1, thereby inhibiting translation of VGAM333 host target RNA, herein schematically represented by VGAM6 HOST TARGET RNA into VGAM333 host target protein, herein schematically represented by VGAM6 HOST TARGET PROTEIN, both of FIG. 1.

[5826] VGAM334 RNA, herein schematically represented by VGAM7 binds complimentarily to a host target binding site located in an untranslated region of VGAM334 host target RNA, herein schematically represented by VGAM7 HOST TARGET RNA, which host target binding site corresponds to a host target binding site such as BINDING SITE 1, BINDING SITE II or BINDING SITE III of FIG. 1, thereby inhibiting translation of VGAM334 host target RNA, herein schematically represented by VGAM7 HOST TARGET RNA into VGAM334 host target protein, herein schematically represented by VGAM7 HOST TARGET PROTEIN, both of FIG. 1.

[5827] VGAM335 RNA, herein schematically represented by VGAM8 binds complimentarily to a host target binding site located in an untranslated region of VGAM335 host target RNA, herein schematically represented by VGAM8 HOST TARGET RNA, which host target binding site corresponds to a host target binding site such as BINDING SITE 1, BINDING SITE II or BINDING SITE III of FIG. 1, thereby inhibiting translation of VGAM335 host target RNA, herein schematically represented by VGAM8 HOST TARGET RNA into VGAM335 host target protein, herein schematically represented by VGAM8 HOST TARGET PROTEIN, both of FIG. 1.

[5828] It is appreciated that a function of VGR434 gene, herein designated VGR GENE, is inhibition of expression of host target genes, as part of a novel viral mechanism of attacking a host. Accordingly, utilities of VGR434 gene include diagnosis, prevention and treatment of viral infection by. Specific functions, and accordingly utilities, of VGR434 gene, herein designated VGR GENE, correlate with, and may be deduced from, the identity of the host target genes, which are inhibited by VGAM RNAs comprised in the operon-like cluster of VGR434 gene: VGAM328 host target protein, VGAM329 host target protein, VGAM330 host target protein, VGAM331 host target protein, VGAM332 host target protein, VGAM333 host target protein, VGAM334 host target protein and VGAM335 host target protein, herein schematically represented by VGAM1 HOST TARGET PROTEIN through VGAM HOST TARGET PROTEIN respectively. The function of these host target genes is elaborated hereinabove with reference to VGAM328, VGAM329, VGAM330, VGAM331, VGAM332, VGAM333, VGAM334 and VGAM335

[5829] FIG. 9 further provides a conceptual description of novel bioinformatically detected regulatory viral gene, referred to here as Viral Genomic Record 435(VGR435) viral gene, which encodes an operon-like cluster of novel viral micro RNA-like genes, each of which in turn modulates expression of at least one host target gene, the function and utility of which at least one host target gene is known in the art.

[5830] VGR435 gene, herein designated VGR GENE, is a novel bioinformatically detected regulatory, non protein coding, RNA viral gene. The method by which VGR435 gene was detected is described hereinabove with reference to FIGS. 6-15.

[5831] VGR435 gene encodes VGR435 precursor RNA, herein designated VGR PRECURSOR RNA, an RNA molecule, typically several hundred nucleotides long.

[5832] VGR435 precursor RNA folds spatially, forming VGR435 folded precursor RNA, herein designated VGR FOLDED PRECURSOR RNA. It is appreciated that VGR435 folded precursor RNA, herein designated VGR FOLDED PRECURSOR RNA, comprises a plurality of what is known in the art as hairpin structures. These hairpin structures are due to the fact that the nucleotide sequence of VGR435 precursor RNA comprises a plurality of segments, the first half of each such segment having a nucleotide sequence which is at least a partial inversed-reversed sequence of the second half thereof, as is well known in the art.

[5833] VGR435 folded precursor RNA, herein designated VGR FOLDED PRECURSOR RNA, is naturally processed by cellular enzymatic activity into at least 5 separate VGAM precursor RNAs, VGAM336 precursor RNA, VGAM337 precursor RNA, VGAM338 precursor RNA, VGAM339 precursor RNA and VGAM340 precursor RNA, herein schematically represented by VGAM1 PRECURSOR, VGAM2 PRECURSOR, VGAM3 PRECURSOR, VGAM4 PRECURSOR and VGAM5 PRECURSOR respectively, each of which VGAM precursor RNAs being a hairpin shaped RNA segment, corresponding to VGAM PRECURSOR RNA of FIG. 8.

[5834] The above mentioned VGAM precursor RNAs are diced by DICER COMPLEX of FIG. 8, yielding respective short RNA segments of about 22 nucleotides in length, VGAM336 RNA, VGAM337 RNA, VGAM338 RNA, VGAM339 RNA and VGAM340 RNA respectively, herein schematically represented by VGAM1 RNA, VGAM2 RNA, VGAM3 RNA, VGAM4 RNA and VGAM5 RNA respectively, each of which VGAM RNAs corresponding to VGAM RNA of FIG. 8.

[5835] VGAM336 RNA, herein schematically represented by VGAM1 binds complimentarily to a host target binding site located in an untranslated region of VGAM336 host target RNA, herein schematically represented by VGAM1 HOST TARGET RNA, which host target binding site corresponds to a host target binding site such as BINDING SITE 1, BINDING SITE II or BINDING SITE III of FIG. 1, thereby inhibiting translation of VGAM336 host target RNA, herein schematically represented by VGAM1 HOST TARGET RNA into VGAM336 host target protein, herein schematically represented by VGAM1 HOST TARGET PROTEIN, both of FIG. 1.

[5836] VGAM337 RNA, herein schematically represented by VGAM2 binds complimentarily to a host target binding site located in an untranslated region of VGAM337 host target RNA, herein schematically represented by VGAM2 HOST TARGET RNA, which host target binding site corresponds to a host target binding site such as BINDING SITE 1, BINDING SITE II or BINDING SITE III of FIG. 1, thereby inhibiting translation of VGAM337 host target RNA, herein schematically represented by VGAM2 HOST TARGET RNA into VGAM337 host target protein, herein schematically represented by VGAM2 HOST TARGET PROTEIN, both of FIG. 1.

[5837] VGAM338 RNA, herein schematically represented by VGAM3 binds complimentarily to a host target binding site located in an untranslated region of VGAM338 host target RNA, herein schematically represented by VGAM3 HOST TARGET RNA, which host target binding site corresponds to a host target binding site such as BINDING SITE 1, BINDING SITE II or BINDING SITE III of FIG. 1, thereby inhibiting translation of VGAM338 host target RNA, herein schematically represented by VGAM3 HOST TARGET RNA into VGAM338 host target protein, herein schematically represented by VGAM3 HOST TARGET PROTEIN, both of FIG. 1.

[5838] VGAM339 RNA, herein schematically represented by VGAM4 binds complimentarily to a host target binding site located in an untranslated region of VGAM339 host target RNA, herein schematically represented by VGAM4 HOST TARGET RNA, which host target binding site corresponds to a host target binding site such as BINDING SITE 1, BINDING SITE II or BINDING SITE III of FIG. 1, thereby inhibiting translation of VGAM339 host target RNA, herein schematically represented by VGAM4 HOST TARGET RNA into VGAM339 host target protein, herein schematically represented by VGAM4 HOST TARGET PROTEIN, both of FIG. 1.

[5839] VGAM340 RNA, herein schematically represented by VGAM5 binds complimentarily to a host target binding site located in an untranslated region of VGAM340 host target RNA, herein schematically represented by VGAM5 HOST TARGET RNA, which host target binding site corresponds to a host target binding site such as BINDING SITE 1, BINDING SITE II or BINDING SITE III of FIG. 1, thereby inhibiting translation of VGAM340 host target RNA, herein schematically represented by VGAM5 HOST TARGET RNA into VGAM340 host target protein, herein schematically represented by VGAM5 HOST TARGET PROTEIN, both of FIG. 1.

[5840] It is appreciated that a function of VGR435 gene, herein designated VGR GENE, is inhibition of expression of host target genes, as part of a novel viral mechanism of attacking a host. Accordingly, utilities of VGR435 gene include diagnosis, prevention and treatment of viral infection by. Specific functions, and accordingly utilities, of VGR435 gene, herein designated VGR GENE, correlate with, and may be deduced from, the identity of the host target genes, which are inhibited by VGAM RNAs comprised in the operon-like cluster of VGR435 gene: VGAM336 host target protein, VGAM337 host target protein, VGAM338 host target protein, VGAM339 host target protein and VGAM340 host target protein, herein schematically represented by VGAM1 HOST TARGET PROTEIN through VGAM HOST TARGET PROTEIN respectively. The function of these host target genes is elaborated hereinabove with reference to VGAM336, VGAM337, VGAM338, VGAM339 and VGAM340

[5841] FIG. 9 further provides a conceptual description of novel bioinformatically detected regulatory viral gene, referred to here as Viral Genomic Record 436(VGR436) viral gene, which encodes an operon-like cluster of novel viral micro RNA-like genes, each of which in turn modulates expression of at least one host target gene, the function and utility of which at least one host target gene is known in the art.

[5842] VGR436 gene, herein designated VGR GENE, is a novel bioinformatically detected regulatory, non protein coding, RNA viral gene. The method by which VGR436 gene was detected is described hereinabove with reference to FIGS. 6-15.

[5843] VGR436 gene encodes VGR436 precursor RNA, herein designated VGR PRECURSOR RNA, an RNA molecule, typically several hundred nucleotides long.

[5844] VGR436 precursor RNA folds spatially, forming VGR436 folded precursor RNA, herein designated VGR FOLDED PRECURSOR RNA. It is appreciated that VGR436 folded precursor RNA, herein designated VGR FOLDED PRECURSOR RNA, comprises a plurality of what is known in the art as hairpin structures. These hairpin structures are due to the fact that the nucleotide sequence of VGR436 precursor RNA comprises a plurality of segments, the first half of each such segment having a nucleotide sequence which is at least a partial inversed-reversed sequence of the second half thereof, as is well known in the art.

[5845] VGR436 folded precursor RNA, herein designated VGR FOLDED PRECURSOR RNA, is naturally processed by cellular enzymatic activity into at least 7 separate VGAM precursor RNAs, VGAM341 precursor RNA, VGAM342 precursor RNA, VGAM343 precursor RNA, VGAM344 precursor RNA, VGAM345 precursor RNA, VGAM346 precursor RNA and VGAM347 precursor RNA, herein schematically represented by VGAM1 PRECURSOR, VGAM2 PRECURSOR, VGAM3 PRECURSOR, VGAM4 PRECURSOR, VGAM5 PRECURSOR, VGAM6 PRECURSOR and VGAM7 PRECURSOR respectively, each of which VGAM precursor RNAs being a hairpin shaped RNA segment, corresponding to VGAM PRECURSOR RNA of FIG. 8.

[5846] The above mentioned VGAM precursor RNAs are diced by DICER COMPLEX of FIG. 8, yielding respective short RNA segments of about 22 nucleotides in length, VGAM341 RNA, VGAM342 RNA, VGAM343 RNA, VGAM344 RNA, VGAM345 RNA, VGAM346 RNA and VGAM347 RNA respectively, herein schematically represented by VGAM1 RNA, VGAM2 RNA, VGAM3 RNA, VGAM4 RNA, VGAM5 RNA, VGAM6 RNA and VGAM7 RNA respectively, each of which VGAM RNAs corresponding to VGAM RNA of FIG. 8.

[5847] VGAM341 RNA, herein schematically represented by VGAM1 binds complimentarily to a host target binding site located in an untranslated region of VGAM341 host target RNA, herein schematically represented by VGAM1 HOST TARGET RNA, which host target binding site corresponds to a host target binding site such as BINDING SITE I, BINDING SITE II or BINDING SITE III of FIG. 1, thereby inhibiting translation of VGAM341 host target RNA, herein schematically represented by VGAM1 HOST TARGET RNA into VGAM341 host target protein, herein schematically represented by VGAM1 HOST TARGET PROTEIN, both of FIG. 1.

[5848] VGAM342 RNA, herein schematically represented by VGAM2 binds complimentarily to a host target binding site located in an untranslated region of VGAM342 host target RNA, herein schematically represented by VGAM2 HOST TARGET RNA, which host target binding site corresponds to a host target binding site such as BINDING SITE 1, BINDING SITE II or BINDING SITE III of FIG. 1, thereby inhibiting translation of VGAM342 host target RNA, herein schematically represented by VGAM2 HOST TARGET RNA into VGAM342 host target protein, herein schematically represented by VGAM2 HOST TARGET PROTEIN, both of FIG. 1.

[5849] VGAM343 RNA, herein schematically represented by VGAM3 binds complimentarily to a host target binding site located in an untranslated region of VGAM343 host target RNA, herein schematically represented by VGAM3 HOST TARGET RNA, which host target binding site corresponds to a host target binding site such as BINDING SITE 1, BINDING SITE II or BINDING SITE III of FIG. 1, thereby inhibiting translation of VGAM343 host target RNA, herein schematically represented by VGAM3 HOST TARGET RNA into VGAM343 host target protein, herein schematically represented by VGAM3 HOST TARGET PROTEIN, both of FIG. 1.

[5850] VGAM344 RNA, herein schematically represented by VGAM4 binds complimentarily to a host target binding site located in an untranslated region of VGAM344 host target RNA, herein schematically represented by VGAM4 HOST TARGET RNA, which host target binding site corresponds to a host target binding site such as BINDING SITE 1, BINDING SITE II or BINDING SITE III of FIG. 1, thereby inhibiting translation of VGAM344 host target RNA, herein schematically represented by VGAM4 HOST TARGET RNA into VGAM344 host target protein, herein schematically represented by VGAM4 HOST TARGET PROTEIN, both of FIG. 1.

[5851] VGAM345 RNA, herein schematically represented by VGAM5 binds complimentarily to a host target binding site located in an untranslated region of VGAM345 host target RNA, herein schematically represented by VGAM5 HOST TARGET RNA, which host target binding site corresponds to a host target binding site such as BINDING SITE 1, BINDING SITE II or BINDING SITE III of FIG. 1, thereby inhibiting translation of VGAM345 host target RNA, herein schematically represented by VGAM5 HOST TARGET RNA into VGAM345 host target protein, herein schematically represented by VGAM5 HOST TARGET PROTEIN, both of FIG. 1.

[5852] VGAM346 RNA, herein schematically represented by VGAM6 binds complimentarily to a host target binding site located in an untranslated region of VGAM346 host target RNA, herein schematically represented by VGAM6 HOST TARGET RNA, which host target binding site corresponds to a host target binding site such as BINDING SITE I, BINDING SITE II or BINDING SITE III of FIG. 1, thereby inhibiting translation of VGAM346 host target RNA, herein schematically represented by VGAM6 HOST TARGET RNA into VGAM346 host target protein, herein schematically represented by VGAM6 HOST TARGET PROTEIN, both of FIG. 1.

[5853] VGAM347 RNA, herein schematically represented by VGAM7 binds complimentarily to a host target binding site located in an untranslated region of VGAM347 host target RNA, herein schematically represented by VGAM7 HOST TARGET RNA, which host target binding site corresponds to a host target binding site such as BINDING SITE I, BINDING SITE II or BINDING SITE III of FIG. 1, thereby inhibiting translation of VGAM347 host target RNA, herein schematically represented by VGAM7 HOST TARGET RNA into VGAM347 host target protein, herein schematically represented by VGAM7 HOST TARGET PROTEIN, both of FIG. 1.

[5854] It is appreciated that a function of VGR436 gene, herein designated VGR GENE, is inhibition of expression of host target genes, as part of a novel viral mechanism of attacking a host. Accordingly, utilities of VGR436 gene include diagnosis, prevention and treatment of viral infection by. Specific functions, and accordingly utilities, of VGR436 gene, herein designated VGR GENE, correlate with, and may be deduced from, the identity of the host target genes, which are inhibited by VGAM RNAs comprised in the operon-like cluster of VGR436 gene: VGAM341 host target protein, VGAM342 host target protein, VGAM343 host target protein, VGAM344 host target protein, VGAM345 host target protein, VGAM346 host target protein and VGAM347 host target protein, herein schematically represented by VGAM1 HOST TARGET PROTEIN through VGAM HOST TARGET PROTEIN respectively. The function of these host target genes is elaborated hereinabove with reference to VGAM341, VGAM342, VGAM343, VGAM344, VGAM345, VGAM346 and VGAM347

[5855] FIG. 9 further provides a conceptual description of novel bioinformatically detected regulatory viral gene, referred to here as Viral Genomic Record 437(VGR437) viral gene, which encodes an operon-like cluster of novel viral micro RNA-like genes, each of which in turn modulates expression of at least one host target gene, the function and utility of which at least one host target gene is known in the art.

[5856] VGR437 gene, herein designated VGR GENE, is a novel bioinformatically detected regulatory, non protein coding, RNA viral gene. The method by which VGR437 gene was detected is described hereinabove with reference to FIGS. 6-15.

[5857] VGR437 gene encodes VGR437 precursor RNA, herein designated VGR PRECURSOR RNA, an RNA molecule, typically several hundred nucleotides long.

[5858] VGR437 precursor RNA folds spatially, forming VGR437 folded precursor RNA, herein designated VGR FOLDED PRECURSOR RNA. It is appreciated that VGR437 folded precursor RNA, herein designated VGR FOLDED PRECURSOR RNA, comprises a plurality of what is known in the art as hairpin structures. These hairpin structures are due to the fact that the nucleotide sequence of VGR437 precursor RNA comprises a plurality of segments, the first half of each such segment having a nucleotide sequence which is at least a partial inversed-reversed sequence of the second half thereof, as is well known in the art.

[5859] VGR437 folded precursor RNA, herein designated VGR FOLDED PRECURSOR RNA, is naturally processed by cellular enzymatic activity into at least 8 separate VGAM precursor RNAs, VGAM348 precursor RNA, VGAM349 precursor RNA, VGAM350 precursor RNA, VGAM351 precursor RNA, VGAM352 precursor RNA, VGAM353 precursor RNA, VGAM354 precursor RNA and VGAM355 precursor RNA, herein schematically represented by VGAM1 PRECURSOR, VGAM2 PRECURSOR, VGAM3 PRECURSOR, VGAM4 PRECURSOR, VGAM5 PRECURSOR, VGAM6 PRECURSOR, VGAM7 PRECURSOR and VGAM8 PRECURSOR respectively, each of which VGAM precursor RNAs being a hairpin shaped RNA segment, corresponding to VGAM PRECURSOR RNA of FIG. 8.

[5860] The above mentioned VGAM precursor RNAs are diced by DICER COMPLEX of FIG. 8, yielding respective short RNA segments of about 22 nucleotides in length, VGAM348 RNA, VGAM349 RNA, VGAM350 RNA, VGAM351 RNA, VGAM352 RNA, VGAM353 RNA, VGAM354 RNA and VGAM355 RNA respectively, herein schematically represented by VGAM1 RNA, VGAM2 RNA, VGAM3 RNA, VGAM4 RNA, VGAM5 RNA, VGAM6 RNA, VGAM7 RNA and VGAM8 RNA respectively, each of which VGAM RNAs corresponding to VGAM RNA of FIG. 8.

[5861] VGAM348 RNA, herein schematically represented by VGAM1 binds complimentarily to a host target binding site located in an untranslated region of VGAM348 host target RNA, herein schematically represented by VGAM1 HOST TARGET RNA, which host target binding site corresponds to a host target binding site such as BINDING SITE I, BINDING SITE II or BINDING SITE III of FIG. 1, thereby inhibiting translation of VGAM348 host target RNA, herein schematically represented by VGAM1 HOST TARGET RNA into VGAM348 host target protein, herein schematically represented by VGAM1 HOST TARGET PROTEIN, both of FIG. 1.

[5862] VGAM349 RNA, herein schematically represented by VGAM2 binds complimentarily to a host target binding site located in an untranslated region of VGAM349 host target RNA, herein schematically represented by VGAM2 HOST TARGET RNA, which host target binding site corresponds to a host target binding site such as BINDING SITE I, BINDING SITE II or BINDING SITE III of FIG. 1, thereby inhibiting translation of VGAM349 host target RNA, herein schematically represented by VGAM2 HOST TARGET RNA into VGAM349 host target protein, herein schematically represented by VGAM2 HOST TARGET PROTEIN, both of FIG. 1.

[5863] VGAM350 RNA, herein schematically represented by VGAM3 binds complimentarily to a host target binding site located in an untranslated region of VGAM350 host target RNA, herein schematically represented by VGAM3 HOST TARGET RNA, which host target binding site corresponds to a host target binding site such as BINDING SITE I, BINDING SITE II or BINDING SITE III of FIG. 1, thereby inhibiting translation of VGAM350 host target RNA, herein schematically represented by VGAM3 HOST TARGET RNA into VGAM350 host target protein, herein schematically represented by VGAM3 HOST TARGET PROTEIN, both of FIG. 1.

[5864] VGAM351 RNA, herein schematically represented by VGAM4 binds complimentarily to a host target binding site located in an untranslated region of VGAM351 host target RNA, herein schematically represented by VGAM4 HOST TARGET RNA, which host target binding site corresponds to a host target binding site such as BINDING SITE I, BINDING SITE II or BINDING SITE III of FIG. 1, thereby inhibiting translation of VGAM351 host target RNA, herein schematically represented by VGAM4 HOST TARGET RNA into VGAM351 host target protein, herein schematically represented by VGAM4 HOST TARGET PROTEIN, both of FIG. 1.

[5865] VGAM352 RNA, herein schematically represented by VGAM5 binds complimentarily to a host target binding site located in an untranslated region of VGAM352 host target RNA, herein schematically represented by VGAM5 HOST TARGET RNA, which host target binding site corresponds to a host target binding site such as BINDING SITE I, BINDING SITE II or BINDING SITE III of FIG. 1, thereby inhibiting translation of VGAM352 host target RNA, herein schematically represented by VGAM5 HOST TARGET RNA into VGAM352 host target protein, herein schematically represented by VGAM5 HOST TARGET PROTEIN, both of FIG. 1.

[5866] VGAM353 RNA, herein schematically represented by VGAM6 binds complimentarily to a host target binding site located in an untranslated region of VGAM353 host target RNA, herein schematically represented by VGAM6 HOST TARGET RNA, which host target binding site corresponds to a host target binding site such as BINDING SITE 1, BINDING SITE II or BINDING SITE III of FIG. 1, thereby inhibiting translation of VGAM353 host target RNA, herein schematically represented by VGAM6 HOST TARGET RNA into VGAM353 host target protein, herein schematically represented by VGAM6 HOST TARGET PROTEIN, both of FIG. 1.

[5867] VGAM354 RNA, herein schematically represented by VGAM7 binds complimentarily to a host target binding site located in an untranslated region of VGAM354 host target RNA, herein schematically represented by VGAM7 HOST TARGET RNA, which host target binding site corresponds to a host target binding site such as BINDING SITE 1, BINDING SITE II or BINDING SITE III of FIG. 1, thereby inhibiting translation of VGAM354 host target RNA, herein schematically represented by VGAM7 HOST TARGET RNA into VGAM354 host target protein, herein schematically represented by VGAM7 HOST TARGET PROTEIN, both of FIG. 1.

[5868] VGAM355 RNA, herein schematically represented by VGAM8 binds complimentarily to a host target binding site located in an untranslated region of VGAM355 host target RNA, herein schematically represented by VGAM8 HOST TARGET RNA, which host target binding site corresponds to a host target binding site such as BINDING SITE I, BINDING SITE II or BINDING SITE III of FIG. 1, thereby inhibiting translation of VGAM355 host target RNA, herein schematically represented by VGAM8 HOST TARGET RNA into VGAM355 host target protein, herein schematically represented by VGAM8 HOST TARGET PROTEIN, both of FIG. 1.

[5869] It is appreciated that a function of VGR437 gene, herein designated VGR GENE, is inhibition of expression of host target genes, as part of a novel viral mechanism of attacking a host. Accordingly, utilities of VGR437 gene include diagnosis, prevention and treatment of viral infection by. Specific functions, and accordingly utilities, of VGR437 gene, herein designated VGR GENE, correlate with, and may be deduced from, the identity of the host target genes, which are inhibited by VGAM RNAs comprised in the operon-like cluster of VGR437 gene: VGAM348 host target protein, VGAM349 host target protein, VGAM350 host target protein, VGAM351 host target protein, VGAM352 host target protein, VGAM353 host target protein, VGAM354 host target protein and VGAM355 host target protein, herein schematically represented by VGAM1 HOST TARGET PROTEIN through VGAM HOST TARGET PROTEIN respectively. The function of these host target genes is elaborated hereinabove with reference to VGAM348, VGAM349, VGAM350, VGAM351, VGAM352, VGAM353, VGAM354 and VGAM355

[5870] FIG. 9 further provides a conceptual description of novel bioinformatically detected regulatory viral gene, referred to here as Viral Genomic Record 438(VGR438) viral gene, which encodes an operon-like cluster of novel viral micro RNA-like genes, each of which in turn modulates expression of at least one host target gene, the function and utility of which at least one host target gene is known in the art.

[5871] VGR438 gene, herein designated VGR GENE, is a novel bioinformatically detected regulatory, non protein coding, RNA viral gene. The method by which VGR438 gene was detected is described hereinabove with reference to FIGS. 6-15.

[5872] VGR438 gene encodes VGR438 precursor RNA, herein designated VGR PRECURSOR RNA, an RNA molecule, typically several hundred nucleotides long.

[5873] VGR438 precursor RNA folds spatially, forming VGR438 folded precursor RNA, herein designated VGR FOLDED PRECURSOR RNA. It is appreciated that VGR438 folded precursor RNA, herein designated VGR FOLDED PRECURSOR RNA, comprises a plurality of what is known in the art as hairpin structures. These hairpin structures are due to the fact that the nucleotide sequence of VGR438 precursor RNA comprises a plurality of segments, the first half of each such segment having a nucleotide sequence which is at least a partial inversed-reversed sequence of the second half thereof, as is well known in the art.

[5874] VGR438 folded precursor RNA, herein designated VGR FOLDED PRECURSOR RNA, is naturally processed by cellular enzymatic activity into at least 2 separate VGAM precursor RNAs, VGAM356 precursor RNA and VGAM357 precursor RNA, herein schematically represented by VGAM1 PRECURSOR and VGAM2 PRECURSOR respectively, each of which VGAM precursor RNAs being a hairpin shaped RNA segment, corresponding to VGAM PRECURSOR RNA of FIG. 8.

[5875] The above mentioned VGAM precursor RNAs are diced by DICER COMPLEX of FIG. 8, yielding respective short RNA segments of about 22 nucleotides in length, VGAM356 RNA and VGAM357 RNA respectively, herein schematically represented by VGAM1 RNA and VGAM2 RNA respectively, each of which VGAM RNAs corresponding to VGAM RNA of FIG. 8.

[5876] VGAM356 RNA, herein schematically represented by VGAM1 binds complimentarily to a host target binding site located in an untranslated region of VGAM356 host target RNA, herein schematically represented by VGAM1 HOST TARGET RNA, which host target binding site corresponds to a host target binding site such as BINDING SITE 1, BINDING SITE II or BINDING SITE III of FIG. 1, thereby inhibiting translation of VGAM356 host target RNA, herein schematically represented by VGAM1 HOST TARGET RNA into VGAM356 host target protein, herein schematically represented by VGAM1 HOST TARGET PROTEIN, both of FIG. 1.

[5877] VGAM357 RNA, herein schematically represented by VGAM2 binds complimentarily to a host target binding site located in an untranslated region of VGAM357 host target RNA, herein schematically represented by VGAM2 HOST TARGET RNA, which host target binding site corresponds to a host target binding site such as BINDING SITE 1, BINDING SITE II or BINDING SITE III of FIG. 1, thereby inhibiting translation of VGAM357 host target RNA, herein schematically represented by VGAM2 HOST TARGET RNA into VGAM357 host target protein, herein schematically represented by VGAM2 HOST TARGET PROTEIN, both of FIG. 1.

[5878] It is appreciated that a function of VGR438 gene, herein designated VGR GENE, is inhibition of expression of host target genes, as part of a novel viral mechanism of attacking a host. Accordingly, utilities of VGR438 gene include diagnosis, prevention and treatment of viral infection by. Specific functions, and accordingly utilities, of VGR438 gene, herein designated VGR GENE, correlate with, and may be deduced from, the identity of the host target genes, which are inhibited by VGAM RNAs comprised in the operon-like cluster of VGR438 gene: VGAM356 host target protein and VGAM357 host target protein, herein schematically represented by VGAM1 HOST TARGET PROTEIN and VGAM HOST TARGET PROTEIN respectively. The function of these host target genes is elaborated hereinabove with reference to VGAM356 and VGAM357

[5879] FIG. 9 further provides a conceptual description of novel bioinformatically detected regulatory viral gene, referred to here as Viral Genomic Record 439(VGR439) viral gene, which encodes an operon-like cluster of novel viral micro RNA-like genes, each of which in turn modulates expression of at least one host target gene, the function and utility of which at least one host target gene is known in the art.

[5880] VGR439 gene, herein designated VGR GENE, is a novel bioinformatically detected regulatory, non protein coding, RNA viral gene. The method by which VGR439 gene was detected is described hereinabove with reference to FIGS. 6-15.

[5881] VGR439 gene encodes VGR439 precursor RNA, herein designated VGR PRECURSOR RNA, an RNA molecule, typically several hundred nucleotides long.

[5882] VGR439 precursor RNA folds spatially, forming VGR439 folded precursor RNA, herein designated VGR FOLDED PRECURSOR RNA. It is appreciated that VGR439 folded precursor RNA, herein designated VGR FOLDED PRECURSOR RNA, comprises a plurality of what is known in the art as hairpin structures. These hairpin structures are due to the fact that the nucleotide sequence of VGR439 precursor RNA comprises a plurality of segments, the first half of each such segment having a nucleotide sequence which is at least a partial inversed-reversed sequence of the second half thereof, as is well known in the art.

[5883] VGR439 folded precursor RNA, herein designated VGR FOLDED PRECURSOR RNA, is naturally processed by cellular enzymatic activity into at least 2 separate VGAM precursor RNAs, VGAM358 precursor RNA and VGAM359 precursor RNA, herein schematically represented by VGAM1 PRECURSOR and VGAM2 PRECURSOR respectively, each of which VGAM precursor RNAs being a hairpin shaped RNA segment, corresponding to VGAM PRECURSOR RNA of FIG. 8.

[5884] The above mentioned VGAM precursor RNAs are diced by DICER COMPLEX of FIG. 8, yielding respective short RNA segments of about 22 nucleotides in length, VGAM358 RNA and VGAM359 RNA respectively, herein schematically represented by VGAM1 RNA and VGAM2 RNA respectively, each of which VGAM RNAs corresponding to VGAM RNA of FIG. 8.

[5885] VGAM358 RNA, herein schematically represented by VGAM1 binds complimentarily to a host target binding site located in an untranslated region of VGAM358 host target RNA, herein schematically represented by VGAM1 HOST TARGET RNA, which host target binding site corresponds to a host target binding site such as BINDING SITE 1, BINDING SITE II or BINDING SITE III of FIG. 1, thereby inhibiting translation of VGAM358 host target RNA, herein schematically represented by VGAM1 HOST TARGET RNA into VGAM358 host target protein, herein schematically represented by VGAM1 HOST TARGET PROTEIN, both of FIG. 1.

[5886] VGAM359 RNA, herein schematically represented by VGAM2 binds complimentarily to a host target binding site located in an untranslated region of VGAM359 host target RNA, herein schematically represented by VGAM2 HOST TARGET RNA, which host target binding site corresponds to a host target binding site such as BINDING SITE 1, BINDING SITE II or BINDING SITE III of FIG. 1, thereby inhibiting translation of VGAM359 host target RNA, herein schematically represented by VGAM2 HOST TARGET RNA into VGAM359 host target protein, herein schematically represented by VGAM2 HOST TARGET PROTEIN, both of FIG. 1.

[5887] It is appreciated that a function of VGR439 gene, herein designated VGR GENE, is inhibition of expression of host target genes, as part of a novel viral mechanism of attacking a host. Accordingly, utilities of VGR439 gene include diagnosis, prevention and treatment of viral infection by. Specific functions, and accordingly utilities, of VGR439 gene, herein designated VGR GENE, correlate with, and may be deduced from, the identity of the host target genes, which are inhibited by VGAM RNAs comprised in the operon-like cluster of VGR439 gene: VGAM358 host target protein and VGAM359 host target protein, herein schematically represented by VGAM1 HOST TARGET PROTEIN and VGAM HOST TARGET PROTEIN respectively. The function of these host target genes is elaborated hereinabove with reference to VGAM358 and VGAM359

[5888] FIG. 9 further provides a conceptual description of novel bioinformatically detected regulatory viral gene, referred to here as Viral Genomic Record 440(VGR440) viral gene, which encodes an operon-like cluster of novel viral micro RNA-like genes, each of which in turn modulates expression of at least one host target gene, the function and utility of which at least one host target gene is known in the art.

[5889] VGR440 gene, herein designated VGR GENE, is a novel bioinformatically detected regulatory, non protein coding, RNA viral gene. The method by which VGR440 gene was detected is described hereinabove with reference to FIGS. 6-15.

[5890] VGR440 gene encodes VGR440 precursor RNA, herein designated VGR PRECURSOR RNA, an RNA molecule, typically several hundred nucleotides long.

[5891] VGR440 precursor RNA folds spatially, forming VGR440 folded precursor RNA, herein designated VGR FOLDED PRECURSOR RNA. It is appreciated that VGR440 folded precursor RNA, herein designated VGR FOLDED PRECURSOR RNA, comprises a plurality of what is known in the art as hairpin structures. These hairpin structures are due to the fact that the nucleotide sequence of VGR440 precursor RNA comprises a plurality of segments, the first half of each such segment having a nucleotide sequence which is at least a partial inversed-reversed sequence of the second half thereof, as is well known in the art.

[5892] VGR440 folded precursor RNA, herein designated VGR FOLDED PRECURSOR RNA, is naturally processed by cellular enzymatic activity into at least 2 separate VGAM precursor RNAs, VGAM361 precursor RNA and VGAM362 precursor RNA, herein schematically represented by VGAM1 PRECURSOR and VGAM2 PRECURSOR respectively, each of which VGAM precursor RNAs being a hairpin shaped RNA segment, corresponding to VGAM PRECURSOR RNA of FIG. 8.

[5893] The above mentioned VGAM precursor RNAs are diced by DICER COMPLEX of FIG. 8, yielding respective short RNA segments of about 22 nucleotides in length, VGAM361 RNA and VGAM362 RNA respectively, herein schematically represented by VGAM1 RNA and VGAM2 RNA respectively, each of which VGAM RNAs corresponding to VGAM RNA of FIG. 8.

[5894] VGAM361 RNA, herein schematically represented by VGAM1 binds complimentarily to a host target binding site located in an untranslated region of VGAM361 host target RNA, herein schematically represented by VGAM1 HOST TARGET RNA, which host target binding site corresponds to a host target binding site such as BINDING SITE I, BINDING SITE II or BINDING SITE III of FIG. 1, thereby inhibiting translation of VGAM361 host target RNA, herein schematically represented by VGAM1 HOST TARGET RNA into VGAM361 host target protein, herein schematically represented by VGAM1 HOST TARGET PROTEIN, both of FIG. 1.

[5895] VGAM362 RNA, herein schematically represented by VGAM2 binds complimentarily to a host target binding site located in an untranslated region of VGAM362 host target RNA, herein schematically represented by VGAM2 HOST TARGET RNA, which host target binding site corresponds to a host target binding site such as BINDING SITE I, BINDING SITE II or BINDING SITE III of FIG. 1, thereby inhibiting translation of VGAM362 host target RNA, herein schematically represented by VGAM2 HOST TARGET RNA into VGAM362 host target protein, herein schematically represented by VGAM2 HOST TARGET PROTEIN, both of FIG. 1.

[5896] It is appreciated that a function of VGR440 gene, herein designated VGR GENE, is inhibition of expression of host target genes, as part of a novel viral mechanism of attacking a host. Accordingly, utilities of VGR440 gene include diagnosis, prevention and treatment of viral infection by. Specific functions, and accordingly utilities, of VGR440 gene, herein designated VGR GENE, correlate with, and may be deduced from, the identity of the host target genes, which are inhibited by VGAM RNAs comprised in the operon-like cluster of VGR440 gene: VGAM361 host target protein and VGAM362 host target protein, herein schematically represented by VGAM1 HOST TARGET PROTEIN and VGAM HOST TARGET PROTEIN respectively. The function of these host target genes is elaborated hereinabove with reference to VGAM361 and VGAM362

### BIBLIOGRAPHY

[5897] It is appreciated by persons skilled in the art that the present invention is not limited by what has been particularly shown and described hereinabove. Rather the scope of the present invention includes both combinations and subcombinations of the various features described hereinabove as well as variations and modifications which would occur to persons skilled in the art upon reading the specifications and which are not in the prior art.
[5898] 1. Zuker, C. S.: On the evolution of eyes: would you like it simple or compound? Science 265: 742-743, 1994.
[5899] 2. Fishman, G. I.; Moreno, A. P.; Spray, D. C.; Leinwand, L. A.: Functional analysis of human cardiac gap junction channel mutants. Proc. Nat. Acad. Sci. 88: 3525-3529, 1991.
[5900] 3. Yamauchi, M.; Yamauchi, N.; Meuth, M.: Molecular cloning of the human CTP synthetase gene by functional complementation with purified human metaphase chromosomes. EMBO J. 9: 2095-2099, 1990.
[5901] 4. Vestergaard, P.; Hermann, A. P.; Orskov, H.; Mosekilde, L.; The Danish Osteoporosis Prevention Study: Effect of sex hormone replacement on the insulin-like growth factor system and bone mineral: a cross-sectional and longitudinal study in 595 perimenopausal women participating in the Danish osteoporosis prevention study. J. Clin. Endocr. Metab. 84:2286-2290, 1999.
[5902] 5. Shozu, M.; Akasofu, K.; Harada, T.; Kubota, Y.: A new cause of female pseudohermaphroditism: placental aromatase deficiency. J. Clin. Endocr. Metab. 72: 560-566, 1991.
[5903] 6. Gorn, A. H.; Rudolph, S. M.; Flannery, M. R.; Morton, C. C.; Weremowicz, S.; Wang, J.-T.; Krane, S. M.; Goldring, S. R.: Expression of two human skeletal calcitonin receptor isoforms cloned from a giant cell tumor of bone. J. Clin. Invest. 95: 2680-2691, 1995.
[5904] 7. Bonaiti-Pellie, C.; Briard-Guillemot, M. L.; Feingold, J.; Frezal, J.: Associated congenital malformations in retinoblastoma. Clin. Genet. 7: 37-39, 1975.
[5905] 8. Bookstein, R.; Lee, E. Y.-H. P.; To, H.; Young, L.-J.; Sery, T. W.; Hayes, R. C.; Friedmann, T.; Lee, W.-H.: Human retinoblastoma susceptibility gene: genomic organization and analysis of heterozygous intragenic deletion mutants. Proc. Nat. Acad. Sci. 85: 2210-2214, 1988.
[5906] 9. Brantley, M. A.; Worley, L.; Harbour, J. W.: Altered expression of Rb and p53 in uveal melanomas following plaque radiotherapy. Am. J. Ophthal. 133: 242-248, 2002.
[5907] 10. Bremner, R.; Du, D. C.; Connolly-Wilson, M. J.; Bridge, P.; Ahmad, K. F.; Mostachfi, H.; Rushlow, D.; Dunn, J. M.; Gallie, B. L.: Deletion of RB exons 24 and 25 causes low-penetrance retinoblastoma. Am. J. Hum. Genet. 61: 556-570, 1997.
[5908] 11. Briard-Guillemot, M. L.; Bonaiti-Pellie, C.; Feingold, J.; Frezal, J.: Etude genetique du retinoblastome. Humangenetik 24: 271-284, 1974.
[5909] 12. Brownstein, S.; de Chadarevian, J.-P.; Little, J. M.: Trilateral retinoblastoma: report of two cases. Arch. Ophthal. 102: 257-262, 1984.
[5910] 13. Buchkovich, K.; Duffy, L. A.; Harlow, E.: The retinoblastoma protein is phosphorylated during specific phases of the cell cycle. Cell 58:1097-1105, 1989.
[5911] 14. Lohr, G. W.; Waller, H. D.: Zur Biochemie einiger angeborenerhaemolytischer Anaemien. Folia Haemat. 8: 377-397, 1963.
[5912] 15. Erneux, C.; Roeckel, N.; Takazawa, K.; Mailleux, P.; Vassart, G.; Mattei, M. G.: Localization of the genes for human inositol 1,4,5-trisphosphate3-kinase A (ITPKA) and B (ITPKB) to chromosome regions 15q-14-q21 and 1q41-q43, respectively, by in situ hybridization. Genomics 14:546-547, 1992.
[5913] 16. Takazawa, K.; Perret, J.; Dumont, J. E.; Erneux, C.: Molecular cloning and expression of a new putative inositol 1,4,5-trisphosphate3-kinase isoenzyme. Biochem. J. 278: 883-886, 1991.
[5914] 17. Bohni, R.; Riesgo-Escovar, J.; Oldham, S.; Brogiolo, W.; Stocker, H.; Andruss, B. F.; Beckingham, K.; Hafen, E.: Autonomous control of cell and organ size by CHICO, a Drosophila homolog of vertebrate IRS1-4. Cell 97: 865-875, 1999.
[5915] 18. Fletcher, W. H.; Britz-Cunningham, S. H.; Zuppan, C. W.: Connexin 43 mutations in sporadic and familial defects of laterality. (Letter) New Eng. J. Med. 333: 941-942, 1995.
[5916] 19. Gebbia, M.; Towbin, J. A.; Casey, B.: Failure to detect connexin 43 mutations in 38 cases of sporadic and familial heterotaxy. Circulation 94:1909-1912, 1996.
[5917] 20. Gebbia, M.; Towbin, J. A.; Casey, B.: Connexin 43 gene mutations and heterotaxy. Response. (Letter) Circulation 97: 118 only, 1998.
[5918] 21. Guerrero, P. A.; Schuessler, R. B.; Davis, L. M.; Beyer, E. C.; Johnson, C. M.; Yamada, K. A.; Saffitz, J. E.: Slow ventricular conduction in mice heterozygous for a connexin 43 null mutation. J. Clin. Invest. 99:1991-1998, 1997.
[5919] 22. Li, J.-Y.; Hou, X.-E.; Dahlstrom, A.: GAP-43 and its relation to autonomic and sensory neurons in sciatic nerve and gastrocnemiusmuscle in the rat. J. Auton. Nerv. Syst. 50: 299-309, 1995.
[5920] 23. Liao, Y.; Day, K. H.; Damon, D. N.; Duling, B. R.: Endothelial cell-specific knockout of connexin 43 causes hypotension and bradycardia in mice. Proc. Nat. Acad. Sci. 98: 9989-9994, 2001.
[5921] 24. Liu, X. Z.; Xia, X. J.; Adams, J.; Chen, Z. Y.; Welch, K. O.; Tekin, M.; Ouyang, X. M.; Kristiansen, A.; Pandya, A.; Balkany, T.; Arnos, K. S.; Nance, W. E.: Mutations in GJA1 (connexin 43) are associated with non-syndromic autosomal recessive deafness. Hum. Molec. Genet. 10:2945-2951, 2001.
[5922] 25. Reaume, A. G.; de Sousa, P. A.; Kulkarni, S.; Langille, B. L.; Zhu, D.; Davies, T. C.; Juneja, S. C.; Kidder, G. M.; Rossant, J.: Cardiac malformation in neonatal mice lacking connexin 43. Science 267:1831-1834, 1995.
[5923] 26. Splitt, M. P.; Burn, J.; Goodship, J.: Connexin 43 mutations insporadic and familial defects of laterality. (Letter) New Eng. J. Med. 333: 941, 1995.
[5924] 27. Splitt, M. P.; Tsai, M. Y.; Burn, J.; Goodship, J. A.: Absence of mutations in the regulatory domain of the gap junction protein connexin 43 in patients with visceroatrial heterotaxy. Heart 77:369-370, 1997.
[5925] 28. Toth, T.; Hajdu, J.; Marton, T.; Nagy, B.; Papp, Z.: Connexin 43 gene mutations and heterotaxy. (Letter) Circulation 97: 117-118, 1998.
[5926] 29. Ya, J.; Erdstieck-Ernste, E. B. H. W.; de Boer, P. A. J.; van Kempen, M. J. A.; Jongsma, H.; Gros, D.; Moorman, A. F. M.; Lamers, W. H.: Heart defects in connexin 43-deficient mice. Circ. Res. 82:360-366, 1998.
[5927] 30. Harbour, J. W.; Luo, R. X.; Dei Santi, A.; Postigo, A. A.; Dean, D. C.: Cdk phosphorylation triggers sequential intramolecular interactions that progressively block Rb functions as cells move through G1. Cell 98:859-869, 1999.
[5928] 31. Bullrich, F.; MacLachlan, T. K.; Sang, N.; Druck, T.; Veronese, M. L.; Allen, S. L.; Chiorazzi, N.; Koff, A.; Heubner, K.; Croce, C. M.; Giordano, A.: Chromosomal mapping of members of the cdc2 family of protein kinases, cdk3, cdk6, PISSLRE, and PITALRE, and a cdk inhibitor, p27-Kip1, to regions involved in human cancer. Cancer Res. 55: 1199-1205, 1995.
[5929] 32. Abraham, J. A.; Mergia, A.; Whang, J. L.; Tumolo, A.; Friedman, J.; Hjerild, K. A.; Gospodarowicz, D.; Fiddes, J. C.: Nucleotide sequence of a bovine clone encoding the angiogenic protein, basic fibroblast growth factor. Science 233: 545-548, 1986.
[5930] 33. Abraham, J. A.; Whang, J. L.; Tumolo, A.; Mergia, A.; Friedman, J.; Gospodarowicz, D.; Fiddes, J. C.: Human basic fibroblast growth factor: nucleotide sequence and genomic organization. EMBO J. 5:2523-2528, 1986.
[5931] 34. Doniach, T.: Basic FGF as an inducer of anteroposterior neural pattern. Cell 83: 1067-1070, 1995.
[5932] 35. Dono, R.; Texido, G.; Dussel, R.; Ehmke, H.; Zeller, R.: Impaired cerebral cortex development and blood pressure regulation in FGF2-deficient mice. EMBO J. 17: 4213-4225, 1998.
[5933] 36. Fukushima, Y.; Byers, M. G.; Fiddes, J. C.; Shows, T. B.: The human basic fibroblast growth factor gene (FGFB) is assigned to chromosome 4q25. Cytogenet. Cell Genet. 54: 159-160, 1990.
[5934] 37. Gritti, A.; Parati, E. A.; Cova, L.; Frolichsthal, P.; Galli, R.; Wanke, E.; Faravelli, L.; Morassutti, D. J.; Roisen, F.; Nickel, D. D.; Vescovi, A. L.: Multipotential stem cells from the adult mouse brain proliferate and self-renew in response to basic fibroblast growth factor. J. Neurosci. 16: 1091-1100, 1996.
[5935] 38. Kawaguchi, H.; Nakamura, K.; Tabata, Y.; Ikada, Y.; Aoyama, I.; Anzai, J.; Nakamura, T.; Hiyama, Y.; Tamura, M.: Acceleration of fracture healing in nonhuman primates by fibroblast growth factor-2. J. Clin. Endocr. Metab. 86: 875-880, 2001.
[5936] 39. Kurokawa, T.; Sasada, R.; Iwane, M.; Igarashi, K.: Cloning and expression of cDNA encoding human basic fibroblast growth factor. FEBS Lett. 213: 189-194, 1987.
[5937] 40. Lafage-Pochitaloff, M.; Galland, F.; Simonetti, J.; Prats, H.; Mattei, M.-G.; Birnbaum, D.: The human basic fibroblast growth factor gene is located on the long arm of chromosome 4 at bands q26-q27. Oncogene Res. 5: 241-244, 1990.
[5938] 41. Mattei, M.-G.; Pebusque, M.-J.; Birnbaum, D.: Chromosomal localizations of mouse Fgf2 and Fgf5 genes. Mammalian Genome 2: 135-137, 1992.
[5939] 42. Montero, A.; Okada, Y.; Tomita, M.; Ito, M.; Tsurukami, H.; Nakamura, T.; Doetschman, T.; Coffin, J. D.; Hurley, M. M.: Disruption of the fibroblast growth factor-2 gene results in decreased bone mass and bone formation. J. Clin. Invest. 105: 1085-1093, 2000.
[5940] 43. Ortega, S.; Ittmann, M.; Tsang, S. H.; Ehrlich, M.; Basilico, C.: Neuronal defects and delayed wound healing in mice lacking fibroblast growth factor 2. Proc. Nat. Acad. Sci. 95: 5672-5677, 1998.
[5941] 44. Plotnikov, A. N.; Schlessinger, J.; Hubbard, S. R.; Mohammadi, M.: Structural basis for FGF receptor dimerization and activation. Cell 98:641-650, 1999.
[5942] 45. Avraham, K. B.; Givol, D.; Avivi, A.; Yayon, A.; Copeland, N. G.; Jenkins, N. A.: Mapping of murine fibroblast growth factor receptors refines regions of homology between mouse and human chromosomes. Genomics 21:656-658, 1994.
[5943] 46. Szepetowski, P.; Perucca-Lostanlen, D.; Gaudray, P.: Mapping genes according to their amplification status in tumor cells: contribution to the map of 11q13. Genomics 16: 745-750, 1993.
[5944] 47. Schlossman, S. F.; Boumsell, L.; Gilks, W.; Harlan, J. M.; Kishimoto, T.; Morimoto, C.; Ritz, J.; Shaw, S.; Silverstein, R. L.; Springer, T. A.; Tedder, T. F.; Todd, R. F.: CD antigens 1993. Immun. Today 15:98-99, 1994.
[5945] 48. Whitehouse, D. B.; Attwood, J.; Green, C.; Bruce, M.; McQuade, M.; Tippett, P.: Inheritance and linkage data for an unusual combination of genes (at the LKE, P1 and C6 loci) in a single large sibship. Ann. Hum. Genet. 52: 197-201, 1988.
[5946] 49. Daniels, G. L.; Le Pennec, P. Y.; Rouger, P.; Salmon, C.; Tippett, P.: The red cell antigens Au(a) and Au(b) belong to the Lutheran system. Vox Sang. 60: 191-192, 1991.
[5947] 50. Campbell, I. G.; Foulkes, W. D.; Senger, G.; Trowsdale, J.; Garin-Chesa, P.; Rettig, W. J.: Molecular cloning of the B-CAM cell surface glycoprotein of epithelial cancers: a novel member of the immunoglobulin superfamily. Cancer Res. 54: 5761-5765, 1994.
[5948] 51. Cook, P. J. L.: The Lutheran-secretor recombination fraction in man: a possible sex difference. Ann. Hum. Genet. 28: 393-401, 1965.
[5949] 52. Higashiyama, S.; Lau, K.; Besner, G. E.; Abraham, J. A.; Klagsbrun, M.: Structure of heparin-binding EGF-like growth factor: multiple forms, primary structure, and glycosylation of the mature protein. J. Biol. Chem. 267: 6205-6212, 1992.
[5950] 53. Naglich, J. G.; Metherall, J. E.; Russell, D. W.; Eidels, L.: Expression cloning of a diphtheria toxin receptor: identity with a heparin-binding EGF-like growth factor precursor. Cell 69: 1051-1061, 1992.
[5951] 54. Pappenheimer, A. M., Jr.: Diphtheria toxin. Ann. Rev. Biochem. 46:69-94, 1977.
[5952] 55. Pappenheimer, A. M., Jr.; Gill, D. M.: Diphtheria. Science 182:353-358, 1973.
[5953] 56. Pathak, B. G.; Gilbert, D. J.; Harrison, C. A.; Luetteke, N. C.; Chen, X.; Klagsbrun, M.; Plowman, G. D.; Copeland, N. G.; Jenkins, N. A.; Lee, D. C.: Mouse chromosomal location of three EGF receptor ligands: amphiregulin (Areg), betacellulin (Btc), and heparin-binding EGF (Hegfl). Genomics 28: 116-118, 1995.
[5954] 57. Roberts, M.; Ruddle, F. H.: The Chinese hamster gene map: assignment of four genes (DTS, PGM2, 6PGD, Eno1) to chromosome 2. Exp. Cell Res. 127: 47-54, 1980.
[5955] 58. Keegan, K.; Johnson, D. E.; Williams, L. T.; Hayman, M. J.: Isolation of an additional member of the fibroblast growth factor receptor family, FGFR-3. Proc. Nat. Acad. Sci. 88: 1095-1099, 1991.
[5956] 59. Jutel, M.; Watanabe, T.; Klunker, S.; Akdis, M.; Thomet, O. A. R.; Malolepszy, J.; Zak-Nejmark, T.; Koga, R.; Kobayashi, T.; Blaser, K.; Akdis, C. A.: Histamine regulates T-cell and antibody responses by differential expression of H1 and H2 receptors. Nature 413: 420-425, 2001.
[5957] 60. Dixon, M. J.; Gazzard, J.; Chaudhry, S. S.; Sampson, N.; Schulte, B. A.; Steel, K. P.: Mutation of the Na—K—Cl co-transporter gene Slc12a2 results in deafness in mice. Hum. Molec. Genet. 8: 1579-1584, 1999.
[5958] 61. Bora, N. S.; Lublin, D. M.; Kumar, B. V.; Hockett, R. D.; Holers, V. M.; Atkinson, J. P.: Structural gene for human membrane cofactor protein (MCP) of complement maps to within 100 kb of the 3-prime end of the C3b/C4b receptor gene. J. Exp. Med. 169: 597-602, 1989.
[5959] 62. Cui, W.; Hourcade, D.; Post, T.; Greenlund, A. C.; Atkinson, J. P.; Kumar, V.: Characterization of the promoter region of the membrane cofactor protein (CD46) gene of the human complement system and comparison to a membrane cofactor protein-like genetic element. J. Immun. 151:4137-4146, 1993.
[5960] 63. Dorig, R. E.; Marcil, A.; Chopra, A.; Richardson, C. D.: The human CD46 molecule is a receptor for measles virus (Edmonston strain). Cell 75:295-305, 1993.
[5961] 64. Kallstrom, H.; Gill, D. B.; Albiger, B.; Liszewski, M. K.; Atkinson, J. P.; Jonsson, A.-B.: Attachment of Neisseria gonorrhoeae to the cellular pilus receptor CD46: identification of domains important for bacterial adherence. Cell. Microbiol. 3: 133-143, 2001.
[5962] 65. Lublin, D. M.; Liszewski, M. K.; Post, T. W.; Arce, M. A.; LeBeau, M. M.; Rebentisch, M. B.; Lemons, R. S.; Seya, T.; Atkinson, J. P.: Molecular cloning and chromosomal localization of human complement membrane cofactor protein (MCP): evidence for inclusion in the multigene family of complement-regulatory proteins. J. Exp. Med. 168: 181-194, 1988.
[5963] 66. Marie, J. C.; Astier, A. L.; Rivailler, P.; Rabourdin-Combe, C.; Wild, T. F.; Horvat, B.: Linking innate and acquired immunity: divergent role of CD46 cytoplasmic domains in T cell-induced inflammation. Nature Immun. 3: 659-666, 2002.
[5964] 67. Post, T. W.; Liszewski, M. K.; Adams, E. M.; Tedja, I.; Miller, E. A.; Atkinson, J. P.: Membrane cofactor protein of the complement system: alternative splicing of serine/threonine/proline-rich exons and cytoplasmic tails produces multiple isoforms that correlate with protein phenotype. J. Exp. Med. 174: 93-102, 1991.
[5965] 68. Purcell, D. F. J.; Johnstone, R. W.; McKenzie, I. F. C.: Identification of four different CD46 (MCP) molecules with anti-peptide antibodies. Biochem. Biophys. Res. Commun. 180: 1091-1097, 1991.
[5966] 69. Santoro, F.; Kennedy, P. E.; Locatelli, G.; Malnati, M. S.; Berger, E. A.; Lusso, P.: CD46 is a cellular receptor for human herpesvirus 6. Cell 99: 817-827, 1999.
[5967] 70. Tatsuo, H.; Ono, N.; Tanaka, K.; Yanagi, Y.: SLAM (CDw150) is a cellular receptor for measles virus. Nature 406: 893-897, 2000.
[5968] 71. Kramer, A.; Yang, F.-C.; Snodgrass, P.; Li, X.; Scammell, T. E.; Davis, F. C.; Weitz, C. J.: Regulation of daily locomotor activity and sleep by hypothalamic EGF receptor signaling. Science 294: 2511-2515, 2001.
[5969] 72. Lanzetti, L.; Rybin, V.; Malabarba, M. G.; Christoforidis, S.; Scita, G.; Zerial, M.; Di Fiore, P. P.: The Eps8 protein coordinates EGF receptor signalling through Rac and trafficking through Rab5. Nature 408:374-377, 2000.
[5970] 73. Volpert, O. V.; Zaichuk, T.; Zhou, W.; Reiher, F.; Ferguson, T. A.; Stuart, P. M.; Amin, M.; Bouck, N. P.: Inducer-stimulated Fastargets activated endothelium for destruction by anti-angiogenic thrombospondin-1 and pigment epithelium-derived factor. Nature Med. 8: 349-357, 2002.
[5971] 74. Yang, J.; Patil, R. V.; Yu, H.; Gordon, M.; Wax, M. B.: T cell subsets and sIL-2R/IL-2 levels in patients with glaucoma. Am. J. Ophthal. 131: 421-426, 2001.
[5972] 75. Cenciarelli, C.; Chiaur, D. S.; Guardavaccaro, D.; Parks, W.; Vidal, M.; Pagano, M.: Identification of a family of human F-box proteins. Curr. Biol. 9: 1177-1179, 1999.
[5973] 76. Winston, J. T.; Koepp, D. M.; Zhu, C.; Elledge, S. J.; Harper, J. W.: A family of mammalian F-box proteins. Curr. Biol. 9: 1180-1182, 1999.
[5974] 77. Mullis, P. E.; Patel, M. S.; Brickell, P. M.; Hindmarsh, P. C.; Brook, C. G. D.: Growth characteristics and response to growth hormone therapy in patients with hypochondroplasia: genetic linkage of the insulin-like growth factor I gene at chromosome 12q23 to the disease in a subgroup of these patients. Clin. Endocr. 34: 265-274, 1991.
[5975] 78. Delespesse, G.; Sarfati, M.; Peleman, R.: Influence of recombinant IL-4, IFN-alpha, and IFN-gamma on the production of human IgE-binding factor (soluble CD23). J. Immun. 142: 134-138, 1989.
[5976] 79. Ludin, C.; Hofstetter, H.; Sarfati, M.; Levy, C. A.; Suter, U.; Alaimo, D.; Kilchherr, E.; Frost, H.; Delespesse, G.: Cloning and expression of the cDNA coding for a human lymphocyte IgE receptor. EMBO J. 6: 109-114, 1987.
[5977] 80. Wendel-Hansen, V.; Riviere, M.; Uno, M.; Jansson, I.; Szpirer, J.; Islam, M. Q.; Levan, G.; Klein, G.; Yodoi, J.; Rosen, A.; Szpirer, C.: The gene encoding CD23 leukocyte antigen (FCE2) is located on human chromosome 19. Somat. Cell Molec. Genet. 16: 283-286, 1990.
[5978] 81. Lai, L.; Hart, I.; Patterson, D.: Human chromosome 1 corrects the defect in the CHO mutant (Ade-H) deficient in a branch point enzyme in purine de novo biosynthesis. (Abstract) Cytogenet. Cell Genet. 51:1028 only, 1989.
[5979] 82. Lai, L.-W.; Hart, I. M.; Patterson, D.: A gene correcting the defect in the CHO mutant Ade(−)H, deficient in a branch point enzyme (adenylosuccinate synthetase) of de novo purine biosynthesis, is located on the long arm of chromosome 1. Genomics 9: 322-328, 1991.
[5980] 83. Powell, S. M.; Zalkin, H.; Dixon, J. E.: Cloning and characterization of the cDNA encoding human adenylosuccinate synthetase. FEBS Lett. 303:4-10, 1992.
[5981] 84. Stengel, D.; Parma, J.; Gannage, M.-H.; Roeckel, N.; Mattei, M.-G.; Barouki, R.; Hanoune, J.: Different chromosomal localization of two adenylyl cyclase genes expressed in human brain. Hum. Genet. 90:126-130, 1992.
[5982] 85. Edelhoff, S.; Villacres, E. C.; Storm, D. R.; Disteche, C. M.: Mapping of adenylyl cyclase genes type I, II, III, IV, V, and VI in mouse. Mammalian Genome 6: 111-113, 1995.
[5983] 86. Gaudin, C.; Homcy, C. J.; Ishikawa, Y.: Mammalian adenylyl cyclase family members are randomly located on different chromosomes. Hum. Genet. 94: 527-529, 1994.
[5984] 87. Wong, S. T.; Trinh, K.; Hacker, B.; Chan, G. C. K.; Lowe, G.; Gaggar, A.; Xia, Z.; Gold, G. H.; Storm, D. R.: Disruption of the type Illadenylyl cyclase gene leads to peripheral and behavioral anosmia intransgenic mice. Neuron 27: 487-497, 2000.
[5985] 88. El Nemer, W.; Rahuel, C.; Colin, Y.; Gane, P.; Cartron, J. P.; Le Van Kim, C.: Organization of the human LU gene and molecular basis of the Lu(a)/Lu(b) blood group polymorphism. Blood 89: 4608-4616, 1997.
[5986] 89. Frandson, S.; Atkins, C. J.; Moulds, M.; Poole, J.; Crawford, M. N.; Tippett, P.: Anti-Au(b): the antithetical antibody to anti-Au(a). Vox Sang. 56: 54-56, 1989.
[5987] 90. Lewis, M.; Kaita, H.; Chown, B.; Giblett, E. R.; Anderson, J.; Cote, G. B.: The Lutheran and Secretor loci: genetic linkage analysis. Am. J. Hum. Genet. 29: 101-106, 1977.
[5988] 91. Lewis, M.; Kaita, H.; Coghlan, G.; Philipps, S.; Belcher, E.; McAlpine, P. J.; Coopland, G. R.; Woods, R. A.: The chromosome 19 linkage group LDLR, C3, LW, APOC2, LU, SE in man. Ann. Hum. Genet. 52: 137-144, 1988.
[5989] 92. Lewis, M.; Kaita, H.; Giblett, E. R.; Anderson, J. E.: Lods for Lu: Se and other loci. Cytogenet. Cell Genet. 22: 627-628, 1978.
[5990] 93. Mohr, J.: Search for linkage between Lutheran blood group and other hereditary characters. Acta Path. Microbiol. Scand. 28: 207-210, 1951.
[5991] 94. Parsons, S. F.; Lee, G.; Spring, F. A.; Willig, T.-N.; Peters, L. L.; Gimm, J. A.; Tanner, M. J. A.; Mohandas, N.; Anstee, D. J.; Chasis, J. A.: Lutheran blood group glycoprotein and its newly characterized mouse homologue specifically bind alpha-5 chain-containing human laminin with high affinity. Blood 97: 312-320, 2001.
[5992] 95. Parsons, S. F.; Mallinson, G.; Daniels, G. L.; Green, C. A.; Smythe, J. S.; Anstee, D. J.: Use of domain-deletion mutants to locate Lutheran blood group antigens to each of the five immunoglobulin superfamily domains of the Lutheran glycoprotein: elucidation of the molecular basis of the Lu(a)/Lu(b) and the Au(a)/Au(b) polymorphisms. Blood 89:4219-4225, 1997.
[5993] 96. Parsons, S. F.; Mallinson, G.; Holmes, C. H.; Houlihan, J. M.; Simpson, K. L.; Mawby, W. J.; Spurr, N. K.; Warne, D.; Barclay, A. N.; Anstee, D. J.: The Lutheran blood group glycoprotein, another member of the immunoglobulin superfamily, is widely expressed in human tissues and is developmentally regulated in human liver. Proc. Nat. Acad. Sci. 92: 5496-5500, 1995.
[5994] 97. Rahuel, C.; Le Van Kim, C.; Mattei, M. G.; Cartron, J. P.; Colin, Y.: A unique gene encodes splice forms of the B-cell adhesion molecule cell surface glycoprotein of epithelial cancer and of the Lutheran blood group glycoprotein. Blood 88: 1865-1872, 1996.
[5995] 98. Salmon, C.; Salmon, D.; Liberge, G.; Andre, R.; Tippett, P.; Sanger, R.: Un nouvel antigene de groupe sanguin erythrocytaire present chez80% des sujets de race blanche. Nouv. Rev. Franc. Hemat. 1: 649-661, 1961.
[5996] 99. Zelinski, T.; Kaita, H.; Johnson, K.; Moulds, M.: Genetic evidence that the gene controlling Au(b) is located on chromosome 19. Vox Sang. 58: 126-128, 1990.
[5997] 100. Evans, R. M.: The steroid and thyroid hormone receptor superfamily. Science 240:889-895, 1988.
[5998] 101. Bader, B. L.; Rayburn, H.; Crowley, D.; Hynes, R. O.: Extensive vasculogenesis, angiogenesis, and organogenesis precede lethality in mice lacking all alpha-V integrins. Cell 95: 507-519, 1998.
[5999] 102. Fernandez-Ruiz, E.; de Villena, F. P.-M.; Rodriguez de Cordoba, S.; Sanchez-Madrid, F.: Regional localization of the human vitronectin receptor alpha-subunit gene (VNRA) to chromosome 2q31-q32. Cytogenet. Cell Genet. 62: 26-28, 1993.
[6000] 103. Sims, M. A.; Field, S. D.; Barnes, M. R.; Shaikh, N.; Ellington, K.; Murphy, K. E.; Spurr, N.; Campbell, D. A.: Cloning and characterisation of ITGAV, the genomic sequence for human cell adhesion protein (vitronectin) receptor alpha subunit, CD51. Cytogenet. Cell Genet. 89: 268-271, 2000.
[6001] 104. Suzuki, S.; Argraves, W. S.; Pytela, R.; Arai, H.; Krusius, T.; Pierschbacher, M. D.; Ruoslahti, E.: cDNA and amino acid sequences of the cell adhesion protein receptor recognizing vitronectin reveal a transmembrane domain and homologies with other adhesion protein receptors. Proc. Nat. Acad. Sci. 83: 8614-8618, 1986.
[6002] 105. Hromas, R.; Collins, S. J.; Hickstein, D.; Raskind, W.; Deaven, L. L.; O'Hara, P.; Hagen, F. S.; Kaushansky, K.: A retinoic acid-responsive human zinc finger gene, MZF-1, preferentially expressed in myeloid cells. J. Biol. Chem. 266: 14183-14187, 1991.
[6003] 106. Morris, J. F.; Rauscher, F. J., III; Davis, B.; Klemsz, M.; Xu, D.; Tenen, D.; Hromas, R.: The myeloid zinc finger gene, MZF-1, regulates the CD34 promoter in vitro. Blood 86: 3640-3647, 1995.
[6004] 107. Tommerup, N.; Aagaard, L.; Lund, C. L.; Boel, E.; Baxendale, S.; Bates, G. P.; Lehrach, H.; Vissing, H.: A zinc-finger gene ZNF141 mapping at 4p16.3/D4S90 is a candidate gene for the Wolf-Hirschhorn (4p-) syndrome. Hum. Molec. Genet. 2: 1571-1575, 1993.
[6005] 108. de Silva, H. V.; Harmony, J. A. K.; Stuart, W. D.; Gil, C. M.; Robbins, J.: Apolipoprotein J: structure and tissue distribution. Biochemistry 29:5380-5389, 1990.
[6006] 109. de Silva, H. V.; Stuart, W. D.; Park, Y. B.; Mao, S. J. T.; Gil, C. M.; Wetterau, J. R.; Busch, S. J.; Harmony, J. A. K.: Purification and characterization of apolipoprotein J. J. Biol. Chem. 265: 14292-14297, 1990.
[6007] 110. Dietzsch, E.; Murphy, B. F.; Kirszbaum, L.; Walker, I. D.; Garson, O. M.: Regional localization of the gene for clusterin (SP-40,40; gene symbol CLI) to human chromosome 8p12-p21. Cytogenet. Cell Genet. 61:178-179, 1992.
[6008] 111. Dragunow, M.; Preston, K.; Dodd, J.; Young, D.; Lawlor, P.; Christie, D.: Clusterin accumulates in dying neurons following status epilepticus. Molec. Brain Res. 32: 279-290, 1995.
[6009] 112. Duguid, J. R.; Bohmont, C. W.; Liu, N.; Tourtellotte, W. W.: Changes in brain gene expression shared by scrapie and Alzheimer disease. Proc. Nat. Acad. Sci. 86: 7260-7264, 1989.
[6010] 113. Fink, T. M.; Zimmer, M.; Tschopp, J.; Etienne, J.; Jenne, D. E.; Lichter, P.: Human clusterin (CLI) maps to 8p21 in proximity to the lipoprotein lipase (LPL) gene. Genomics 16: 526-528, 1993.
[6011] 114. Han, B. H.; DeMattos, R. B.; Dugan, L. L.; Kim-Han, J. S.; Brendza, R. P.; Fryer, J. D.; Kierson, M.; Cirrito, J.; Quick, K.; Harmony, J. A. K.; Aronow, B. J.; Holtzman, D. M.: Clusterin contributes tocaspase-3-independent brain injury following neonatal hypoxia-ischemia. Nature Med. 7: 338-343, 2001.
[6012] 115. Jenne, D. E.; Tschopp, J.: Clusterin: the intriguing guises of a widely expressed glycoprotein. Trends Biochem. Sci. 17: 154-159, 1992.
[6013] 116. Kamboh, M. I.; Harmony, J. A. K.; Sepehrnia, B.; Nwankwo, M.; Ferrell, R. E.: Genetic studies of human apolipoproteins. XX. Genetic polymorphism of apolipoprotein J and its impact on quantitative lipid traits in normolipidemic subjects. Am. J. Hum. Genet. 49: 1167-1173, 1991.
[6014] 117. Kirszbaum, L.; Sharpe, J. A.; Murphy, B.; d'Apice, A. J. F.; Classon, B.; Hudson, P.; Walker, I. D.: Molecular cloning and characterization of the novel, human complement-associated protein, SP-40,40: a link between the complement and reproductive systems. EMBO J. 8: 711-718, 1989.
[6015] 118. Murphy, B. F.; Kirszbaum, L.; Walker, I. D.; d'Apice, A. J. F.: SP-40,40, a newly identified normal human serum protein found in the SC5b-9 complex of complement and in the immune deposits in glomerulonephritis. J. Clin. Invest. 81: 1858-1864, 1988.
[6016] 119. O'Bryan, M. K.; Baker, H. W. G.; Saunders, J. R.; Kirszbaum, L.; Walker, I. D.; Hudson, P.; Liu, D. Y.; Glew, M. D.; d'Apice, A. J. F.; Murphy, B. F.: Human seminal clusterin (SP-40,40): isolation and characterization. J. Clin. Invest. 85: 1477-1486, 1990.
[6017] 120. Purrello, M.; Bettuzzi, S.; Di Pietro, C.; Mirabile, E.; Di Blasi, M.; Rimini, R.; Grzeschik, K.-H.; Ingletti, C.; Corti, A.; Sichel, G.: The gene for SP-40,40, human homolog of rat sulfated glycoprotein 2, rat clusterin, and rat testosterone-repressed prostate message 2, maps to chromosome 8. Genomics 10: 151-156, 1991.
[6018] 121. Slawin, K.; Sawczuk, I. S.; Olsson, C. A.; Buttyan, R.: Chromosomal assignment of the human homologue encoding SGP-2. Biochem. Biophys. Res. Commun. 172: 160-164, 1990.
[6019] 122. Gemmill, R. M.; Bemis, L. T.; Lee, J. P.; Sozen, M. A.; Baron, A.; Zeng, C.; Erickson, P. F.; Hooper, J. E.; Drabkin, H. A.: The TRC8 hereditary kidney cancer gene suppresses growth and functions with VHL in a common pathway. Oncogene 21: 3507-3516, 2002.
[6020] 123. Ju, Y.-T.; Chang, A. C. Y.; She, B.-R.; Tsaur, M.-L.; Hwang, H.-M.; Chao, C. C.-K.; Cohen, S. N.; Lin-Chao, S.: Gas7: a gene expressed preferentially in growth-arrested fibroblasts and terminally differentiated Purkinje neurons affects neurite formation. Proc. Nat. Acad. Sci. 95:11423-11428, 1998.
[6021] 124. Kurtz, A.; Zimmer, A.: Interspecies fluorescence in situ hybridization further defines synteny homology between mouse chromosome 11 and human chromosome 17. Mammalian Genome 6: 379-380, 1995.
[6022] 125. Megonigal, M. D.; Cheung, N.-K. V.; Rappaport, E. F.; Nowell, P. C.; Wilson, R. B.; Jones, D. H.; Addya, K.; Leonard, D. G. B.; Kushner, B. H.; Williams, T. M.; Lange, B. J.; Felix, C. A.: Detection of leukemia-associated MLL-GAS7 translocation early during chemotherapy with DNA topoisomerase II inhibitors. Proc. Nat. Acad. Sci. 97:2814-2819, 2000.
[6023] 126. Chrast, R.; Scott, H. S.; Chen, H.; Kudoh, J.; Rossier, C.; Minoshima, S.; Wang, Y.; Shimizu, N.; Antonarakis, S. E.: Cloning of two human homologs of the Drosophila single-minded gene SIM1 on chromosome 6q and SIM2 on 21q within the Down syndrome chromosomal region. Genome Res. 7: 615-624, 1997.
[6024] 127. Holder, J. L., Jr.; Butte, N. F.; Zinn, A. R.: Profound obesity associated with a balanced translocation that disrupts the SIM1 gene. Hum. Molec. Genet. 9: 101-108, 2000.
[6025] 128. Michaud, J. L.; Boucher, F.; Melnyk, A.; Gauthier, F.; Goshu, E.; Levy, E.; Mitchell, G. A.; Himms-Hagen, J.; Fan, C.-M.: Sim1 haploin sufficiency causes hyperphagia, obesity and reduction of the paraventricular nucleus of the hypothalamus. Hum. Molec. Genet. 10: 1465-1473, 2001.
[6026] 129. Fan, C. M.; Kuwana, E.; Bulfone, A.; Fletcher, C. F.; Copeland, N. G.; Jenkins, N. A.; Crews, S.; Martinez, S.; Puelles, L.; Rubenstein, J. L.; Tessier-Lavigne, M.: Expression patterns of two murine homologs of Drosophila single-minded suggest possible roles in embryonic patterning and in the pathogenesis of Down syndrome. Molec. Cell. Neurosci. 7:1-16, 1996.
[6027] 130. Duke-Cohan, J. S.; Gu, J.; McLaughlin, D. F.; Xu, Y.; Freeman, G. J.; Schlossman, S. F.: Attractin (DPPT-L), a member of the CUB family of cell adhesion and guidance proteins, is secreted by activated human T lymphocytes and modulates immune cell interactions. Proc. Nat. Acad. Sci. 95: 11336-11341, 1998.
[6028] 131. Gunn, T. M.; Miller, K. A.; He, L.; Hyman, R. W.; Davis, R. W.; Azarani, A.; Schlessman, S. F.; Duke-Cohan, J. S.; Barsh, G. S.: The mouse mahogany locus encodes a transmembrane form of human attractin. Nature 398:152-156, 1999.
[6029] 132. He, L.; Gunn, T. M.; Bouley, D. M.; Lu, X.-Y.; Watson, S. J.; Schlossman, S. F.; Duke-Cohan, J. S.; Barsh, G. S.: A biochemical function for attractin in agouti-induced pigmentation and obesity. Nature Genet. 27:40-47, 2001.
[6030] 133. Tang, W.; Gunn, T. M.; McLaughlin, D. F.; Barsh, G. S.; Schlossman, S. F.; Duke-Cohan, J. S.: Secreted and membrane attractin result from alternative splicing of the human ATRN gene. Proc. Nat. Acad. Sci. 97: 6025-6030, 2000.
[6031] 134. Xiao, H.; Neuveut, C.; Tiffany, H. L.; Benkirane, M.; Rich, E. A.; Murphy, P. M.; Jeang, K.-T.: Selective CXCR4 antagonism by Tat: implications for in vivo expansion of coreceptor use by HIV-1. Proc. Nat. Acad. Sci. 97: 11466-11471, 2000.
[6032] 135. Lin, C.-S.; Aebersold, R. H.; Kent, S. B.; Varma, M.; Leavitt, J.: Molecular cloning and characterization of plastin, a human leukocyte protein expressed in transformed human fibroblasts. Molec. Cell. Biol. 8: 4659-4668, 1988.
[6033] 136. Lin, C.-S.; Park, T.; Chen, Z. P.; Leavitt, J.: Human plastingenes: comparative gene structure, chromosome location, and differential expression in normal and neoplastic cells. J. Biol. Chem. 268: 2781-2792, 1993.
[6034] 137. Aggarwal, B. B.; Eessalu, T. E.; Hass, P. E.: Characterization of receptors for human tumour necrosis factor and their regulation by gamma-interferon. Nature 318: 665-667, 1985.
[6035] 138. Evans, A. M.; Petersen, J. W.; Sekhon, G. S.; DeMars, R.: Mapping of prolactin and tumor necrosis factor-beta genes on human chromosome 6p using lymphoblastoid cell deletion mutants. Somat. Cell Molec. Genet. 15: 203-213, 1989.
[6036] 139. Gray, P. W.; Aggarwal, B. B.; Benton, C. V.; Bringman, T. S.; Henzel, W. J.; Jarrett, J. A.; Leung, D. W.; Moffat, B.; Ng, P.; Svedersky, L. P.; Palladino, M. A.; Nedwin, G. E.: Cloning and expression of cDNA for human lymphotoxin, a lymphokine with tumour necrosis activity. Nature 312:721-724, 1984.
[6037] 140. Jongeneel, C. V.; Briant, L.; Udalova, I. A.; Sevin, A.; Nedospasov, S. A.; Cambon-Thomsen, A.: Extensive genetic polymorphism in the human tumor necrosis factor region and relation to extended HLA haplotypes. Proc. Nat. Acad. Sci. 88: 9717-9721, 1991.
[6038] 141. Koss, K.; Satsangi, J.; Fanning, G. C.; Welsh, K. I.; Jewell, D. P.: Cytokine (TNF-alpha, LT-alpha, and IL-10) polymorphisms in inflammatory bowel diseases and normal controls: differential effects on production and allele frequencies. Genes Immun. 1: 185-190, 2000.
[6039] 142. Leonard, W. J.; Donlon, T. A.; Lebo, R. V.; Greene, W. C.: Localization of the gene encoding the human interleukin-2 receptor on chromosome 10. Science 228: 1547-1549, 1985.
[6040] 143. Webb, G. C.; Campbell, H. D.; Lee, J. S.; Young, I. G.: Mapping the gene for murine T-cell growth factor, II-2, to bands B-C on chromosome 3 and for the alpha chain of the IL2-receptor, II-2ra, to bands A2-A3 on chromosome 2. Cytogenet. Cell Genet. 54: 164-168, 1990.
[6041] 144. Heinzmann, H.; Mao, X.-Q.; Akaiwa, M.; Kreomer, R. T.; Gao, P.-S.; Ohshima, K.; Umeshita, R.; Abe, Y.; Braun, S.; Yamashita, T.; Roberts, M. H.; Sugimoto, R.; and 20 others: Genetic variants of IL-13 signalling and human asthma and atopy. Hum. Molec. Genet. 9: 549-559, 2000.
[6042] 145. Dean, F. B.; Lian, L.; O'Donnell, M.: cDNA cloning and gene mapping of human homologs for Schizosaccharomyces pombe rad17, rad1, and hus1 and cloning of homologs from mouse, Caenorhabditis elegans, and Drosophila melanogaster. Genomics 54: 424-436, 1998.
[6043] 146. Dionne, C. A.; Kaplan, R.; Seuanez, H.; O'Brien, S. J.; Jaye, M.: Chromosome assignment by polymerase chain reaction techniques: assignment of the oncogene FGF-5 to human chromosome 4. Biotechniques 8: 190-194, 1990.
[6044] 147. Hebert, J. M.; Rosenquist, T.; Gotz, J.; Martin, G. R.: FGF5 as a regulator of the hair growth cycle: evidence from targeted and spontaneous mutations. Cell 78: 1017-1025, 1994.
[6045] 148. Nguyen, C.; Roux, D.; Mattei, M.-G.; de Lapeyriere, O.; Goldfarb, M.; Birnbaum, D.; Jordan, B. R.: The FGF related oncogenes hst and int.2, and the bcl.1 locus are contained within one megabase in bandq13 of chromosome 11, while the fgf.5 oncogene maps to 4q21. Oncogene 3:703-708, 1988.
[6046] 149. Zhan, X.; Bates, B.; Hu, X.; Goldfarb, M.: The human FGF-5 oncogene encodes a novel protein related to fibroblast growth factors. Molec. Cell. Biol. 8: 3487-3495, 1988.
[6047] 150. Dryja, T. P.; Rapaport, J.; McGee, T. L.; Nork, T. M.; Schwartz, T. L.: Molecular etiology of low-penetrance retinoblastoma in two pedigrees. Am. J. Hum. Genet. 52: 1122-1128, 1993.
[6048] 151. Dryja, T. P.; Rapaport, J. M.; Joyce, J. M.; Petersen, R. A.: Molecular detection of deletions involving band q14 of chromosome 13 in retinoblastomas. Proc. Nat. Acad. Sci. 83: 7391-7394, 1986.
[6049] 152. Dryja, T. P.; Rapaport, J. M.; Weichselbaum, R.; Bruns, G. A. P.: Chromosome 13 restriction fragment length polymorphisms. Hum. Genet. 65: 320-324, 1984.
[6050] 153. Duane, T. B.: Clinical Ophthalmology. Hagerstown: Harper and Row (pub.) 3: 1980. Pp. 13 only.
[6051] 154. Duncan, A. M. V.; Morgan, C.; Gallie, B. L.; Phillips, R. A.; Squire, J.: Re-evaluation of the sublocalization of esterase D and its relation to the retinoblastoma locus by in situ hybridization. Cytogenet. Cell Genet. 44: 153-157, 1987.
[6052] 155. Dunn, J. M.; Phillips, R. A.; Becker, A. J.; Gallie, B. L.: Identification of germline and somatic mutations affecting the retinoblastoma gene. Science 241:1797-1800, 1988.
[6053] 156. Dunn, J. M.; Phillips, R. A.; Zhu, X.; Becker, A.; Gallie, B. L.: Mutations in the RB1 gene and their effects on transcription. Molec. Cell. Biol. 9: 4596-4604, 1989.
[6054] 157. Ejima, Y.; Sasaki, M. S.; Kaneko, A.; Tanooka, H.: Types, rates, origin and expressivity of chromosome mutations involving 13q14 in retinoblastoma patients. Hum. Genet. 79: 118-123, 1988.
[6055] 158. Ejima, Y.; Sasaki, M. S.; Kaneko, A.; Tanooka, H.; Hara, Y.; Hida, T.; Kinoshita, Y.: Possible inactivation of part of chromosome 13 due to 13qXp translocation associated with retinoblastoma. Clin. Genet. 21: 357-361, 1982.
[6056] 159. Eldridge, R.; O'Meara, K.; Kitchin, D.: Superior intelligence in sighted retinoblastoma patients and their families. J. Med. Genet. 9:331-335, 1972.
[6057] 160. Falls, H. F.; Neel, J. V.: Genetics of retinoblastoma. Arch. Ophthal. 46: 367-389, 1951.
[6058] 161. Fitzgerald, P. H.; Stewart, J.; Suckling, R. D.: Retinoblastoma mutation rate in New Zealand and support for the two-hit model. Hum. Genet. 64: 128-130, 1983.
[6059] 162. Francke, U.: Retinoblastoma and chromosome 13. Cytogenet. Cell Genet. 14: 131-134, 1976.
[6060] 163. Francois, J.: Retinoblastoma and osteogenic sarcoma. Ophthalmologica 175:185-191, 1977.
[6061] 164. Francois, J.: Hereditary malignant tumor of the eye. Congenital Anomalies of The Eye. St. Louis: C. V. Mosby Co. (pub.) 1968. Pp. 205-246.
[6062] 165. Francois, J.; Matton, M. T.; De Bie, S.; Tanaka, Y.; Vandenbulcke, D.: Genesis and genetics of retinoblastoma. Ophthalmologica 170:405-425, 1975.
[6063] 166. Friend, S. H.; Bernards, R.; Rogelj, S.; Weinberg, R. A.; Rapaport, J. M.; Albert, D. M.; Dryja, T. P.: A human DNA segment with properties of the gene that predisposes to retinoblastoma and osteosarcoma. Nature 323:643-646, 1986.
[6064] 167. Friend, S. H.; Dryja, T. P.; Weinberg, R. A.: Oncogenes and tumor-suppressing genes. New Eng. J. Med. 318: 618-622, 1988.
[6065] 168. Friend, S. H.; Horowitz, J. M.; Gerber, M. R.; Wang, X.-F.; Bogenmann, E.; Li, F. P.; Weinberg, R. A.: Deletions of a DNA sequence in retinoblastomas and mesenchymal tumors: organization of the sequence and its encoded-protein. Proc. Nat. Acad. Sci. 84: 9059-9063, 1987. Note: Correction: Proc. Nat. Acad. Sci. 85: 2234 only, 1988.
[6066] 169. Fukushima, Y.; Kuroki, Y.; Ito, T.; Kondo, I.; Nishigaki, I.: Familial retinoblastoma (mother and son) with 13q14 deletion. Hum. Genet. 77: 104-107, 1987.
[6067] 170. Fung, Y.-K. T.; Murphree, A. L.; T'Ang, A.; Qian, J.; Hinrichs, S. H.; Benedict, W. F.: Structural evidence for the authenticity of the human retinoblastoma gene. Science 236: 1657-1661, 1987.
[6068] 171. Gallie, B. L.: Predictive testing for retinoblastoma comes of age. (Editorial) Am. J. Hum. Genet. 61: 279-281, 1997.
[6069] 172. Gallie, B. L.; Ellsworth, R. M.; Abramson, D. M.; Phillips, R. A.: Retinoma: spontaneous regression of retinoblastoma or benign manifestation of the mutation? Brit. J. Cancer 45: 513-521, 1982.
[6070] 173. Gallie, B. L.; Phillips, R. A.: Multiple manifestations of theretinoblastoma gene. Birth Defects Orig. Art. Ser. 18(6): 689-701, 1982.
[6071] 174. Garcia-Cao, M.; Gonzalo, S.; Dean, D.; Blasco, M. A.: A role for the Rb family of proteins in controlling telomere length. Nature Genet. 15 October: 2002. Note: Advance Electronic Publication.
[6072] 175. Gey, W.: Dq-, multiple Missbildungen und Retinoblastom. Humangenetik 10:362-365, 1970.
[6073] 176. Niimi, T.; Keck-Waggoner, C. L.; Popescu, N. C.; Zhou, Y.; Levitt, R. C.; Kimura, S.: UGRP1, a uteroglobin/Clara cell secretory protein-related protein, is a novel lung-enriched downstream target gene for the T/EBP/NKX2.1 homeodomain transcription factor. Molec. Endocr. 15: 2021-2036, 2001.
[6074] 177. Niimi, T.; Munakata, M.; Keck-Waggoner, C. L.; Popescu, N. C.; Levitt, R. C.; Hisada, M.; Kimura, S.: A polymorphism in the human UGRP1 gene promoter that regulates transcription is associated with an increased risk of asthma. Am. J. Hum. Genet. 70: 718-725, 2002.
[6075] 178. Juwana, J.-P.; Henderikx, P.; Mischo, A.; Wadle, A.; Fadle, N.; Gerlach, K.; Arends, J. W.; Hoogenboom, H.; Pfreundschuh, M.; Renner, C.: EB/RP gene family encodes tubulin binding proteins. Int. J. Cancer 81: 275-284, 1999.
[6076] 179. Renner, C.; Pfitzenmeier, J.-P.; Gerlach, K.; Held, G.; Ohnesorge, S.; Sahin, U.; Bauer, S.; Pfreundschuh, M.: RP1, a new member of the adenomatous polyposis coli-binding EB1-like gene family, is differently expressed in activated T cells. J. Immun. 159: 1276-1283, 1997.
[6077] 180. Wadle, A.; Thiel, G.; Mischo, A.; Jung, V.; Pfreundschuh, M.; Renner, C.: Chromosomal localization and promoter analysis of the adenomatous polyposis coli binding protein RP1. Oncogene 20: 5920-5929, 2001.
[6078] 181. Feng, S.-L. Y.; Guo, Y.; Factor, V. M.; Thorgeirsson, S. S.; Bell, D. W.; Testa, J. R.; Peifley, K. A.; Winkles, J. A.: The Fn14 immediate-early response gene is induced during liver regeneration and highly expressed in both human and murine hepatocellular carcinomas. Am. J. Path. 156:1253-1261, 2000.
[6079] 182. Meighan-Mantha, R. L.; Hsu, D. K. W.; Guo, Y.; Brown, S. A. N.; Feng, S.-L. Y.; Peifley, K. A.; Alberts, G. F.; Copeland, N. G.; Gilbert, D. J.; Jenkins, N. A.; Richards, C. M.; Winkles, J. A.: The mitogen-inducible Fn14 gene encodes a type I transmembrane protein that modulates fibroblast adhesion and migration. J. Biol. Chem. 274: 33166-33176, 1999.
[6080] 183. Eder, P. S.; Kekuda, R.; Stolc, V.; Altman, S.: Characterization of two scleroderma autoimmune antigens that copurify with human ribonuclease P. Proc. Nat. Acad. Sci. 94: 1101-1106, 1997.
[6081] 184. Bertrand, P.; Poirier, J.; Oda, T.; Finch, C. E.; Pasinetti, G. M.: Association of apolipoprotein E genotype with brain levels of apolipoprotein E and apolipoprotein J (clusterin) in Alzheimer disease. Molec. Brain Res. 33: 174-178, 1995.
[6082] 185. Birkenmeier, E. H.; Letts, V. A.; Frankel, W. N.; Magenheimer, B. S.; Calvet, J. P.: Sulfated glycoprotein-2 (Sgp-2) maps to mouse chromosome 14. Mammalian Genome 4: 131-132, 1993.
[6083] 186. Danik, M.; Chabot, J.-G.; Hassan-Gonzalez, D.; Suh, M.; Quirion, R.: Localization of sulfated glycoprotein-2/clusterin mRNA in the rat brain by in situ hybridization. J. Comp. Neurol. 334: 209-227, 1993.
[6084] 187. Wu, L.; Timmers, C.; Maiti, B.; Saavedra, H. I.; Sang, L.; Chong, G. T.; Nuckolls, F.; Giangrande, P.; Wright, F. A.; Field, S. J.; Greenberg, M. E.; Orkin, S.; Nevins, J. R.; Robinson, M. L.; Leone, G.: The E2F1-3 transcription factors are essential for cellular proliferation. Nature 414:457-462, 2001.
[6085] 188. Bruns, G. A. P.; Regina, V. M.: Adenylate kinase-2, a mitochondrial enzyme. Biochem. Genet. 15: 477-486, 1977.
[6086] 189. Carritt, B.; King, J.; Welch, H. M.: Gene order and localization of enzyme loci on the short arm of chromosome 1. Ann. Hum. Genet. 46:329-335, 1982.
[6087] 190. Goss, S. J.; Harris, H.: Gene transfer by means of cell fusion. II. The mapping of 8 loci on human chromosome 1 by statistical analysis of gene assortment in somatic cell hybrids. J. Cell Sci. 25: 39-57, 1977.
[6088] 191. Van Cong, N.; Billardon, C.; Rebourcet, R.; Kaouel, C. L.-B.; Picard, J. Y.; Weil, D.; Frezal, J.: The existence of a second adenylate kinase locus linked to PGM-1 and peptidase-C. Ann. Genet. 15: 213-218, 1972.
[6089] 192. Pilz, A.; Woodward, K.; Povey, S.; Abbott, C.: Comparative mapping of 50 human chromosome 9 loci in the laboratory mouse. Genomics 25:139-149, 1995.
[6090] 193. Azem, A.; Kessel, M.; Goloubinoff, P.: Characterization of a functional GroEL-14(GroES-7)-2 chaperonin hetero-oligomer. Science 265: 653-656, 1994.
[6091] 194. Cheng, M. Y.; Hartl, F.-U.; Martin, J.; Pollock, R. A.; Kalousek, F.; Neupert, W.; Hallberg, E. M.; Hallberg, R. L.; Horwich, A. L.: Mitochondrial heat-shock protein hsp60 is essential for assembly of proteins imported into yeast mitochondria. Nature 337: 620-625, 1989.
[6092] 195. Ellis, R. J.: The molecular chaperone concept. Semin. Cell Biol. 1:1-9, 1990.
[6093] 196. Fontaine, B.; Davoine, C.-S.; Durr, A.; Paternotte, C.; Feki, I.; Weissenbach, J.; Hazan, J.; Brice, A.: A new locus for autosomal dominant pure spastic paraplegia, on chromosome 2q24-q34. Am. J. Hum. Genet. 66: 702-707, 2000.
[6094] 197. Rothman, J. E.: Polypeptide chain binding proteins: catalysts of protein folding and related processes in cells. Cell 59: 591-601, 1989.
[6095] 198. Saibil, H.; Dong, Z.; Wood, S.; auf der Mauer, A.: Binding of chaperonins. Nature 353: 25-26, 1991.
[6096] 199. Schmidt, M.; Rutkat, K.; Rachel, R.; Pfeifer, G.; Jaenicke, R.; Viitanen, P.; Lorimer, G.; Buchner, J.: Symmetric complexes of GroEchaperonins as part of the functional cycle. Science 265: 656-659, 1994.
[6097] 200. Venner, T. J.; Singh, B.; Gupta, R. S.: Nucleotide sequences and novel structural features of human and Chinese hamster hsp60 (chaperonin) gene families. DNA Cell Biol. 9: 545-552, 1990.
[6098] 201. Jones, M. E. E.; Thorburn, A. W.; Britt, K. L.; Hewitt, K. N.; Wreford, N. G.; Proietto, J.; Oz, O. K.; Leury, B. J.; Robertson, K. M.; Yao, S.; Simpson, E. R.: Aromatase-deficient (ArKO) mice have a phenotype of increased adiposity. Proc. Nat. Acad. Sci. 97: 12735-12740, 2000.
[6099] 202. Weiher, H.; Noda, T.; Gray, D. A.; Sharpe, A. H.; Jaenisch, R.: Transgenic mouse model of kidney disease: insertional inactivation of ubiquitously expressed gene leads to nephrotic syndrome. Cell 62:425-434, 1990.
[6100] 203. Kawagishi, J.; Kumabe, T.; Yoshimoto, T.; Yamamoto, T.: Structure, organization, and transcription units of the human alpha-platelet-derived growth factor receptor gene, PDGFRA. Genomics 30: 224-232, 1995.
[6101] 204. Allore, R.; O'Hanlon, D.; Price, R.; Neilson, K.; Willard, H. F.; Cox, D. R.; Marks, A.; Dunn, R. J.: Gene encoding the beta-subunit of S100 protein is on chromosome 21: implications for Down syndrome. Science 239:1311-1313, 1988.
[6102] 205. Allore, R. J.; Friend, W. C.; O'Hanlon, D.; Neilson, K. M.; Baumal, R.; Dunn, R. J.; Marks, A.: Cloning and expression of the human S100-beta gene. J. Biol. Chem. 265: 15537-15543, 1990.
[6103] 206. Duncan, A. M. V.; Higgins, J.; Dunn, R. J.; Allore, R.; Marks, A.: Refined sublocalization of the human gene encoding the beta subunit of the S100 protein (S100B) and confirmation of a subtle t(9;21) translocation using in situ hybridization. Cytogenet. Cell Genet. 50: 234-235, 1989.
[6104] 207. Reeves, R. H.; Yao, J.; Crowley, M. R.; Buck, S.; Zhang, X.; Yarowsky, P.; Gearhart, J. D.; Hilt, D. C.: Astrocytosis and axonal proliferation in the hippocampus of S100b transgenic mice. Proc. Nat. Acad. Sci. 91:5359-5363, 1994.
[6105] 208. Kurlan, R.; Behr, J.; Medved, L.; Shoulson, I.; Pauls, D.; Kidd, J. R.; Kidd, K. K.: Familial Tourette's syndrome: report of a large pedigree and potential for linkage analysis. Neurology 36: 772-776, 1986.
[6106] 209. Jarrous, N.; Eder, P. S.; Guerrier-Takada, C.; Hoog, C.; Altman, S.: Autoantigenic properties of some protein subunits of catalytically active complexes of human ribonuclease P. RNA 4: 407-417, 1998.
[6107] 210. Fujimoto, K.; Shen, M.; Noshiro, M.; Matsubara, K.; Shingu, S.; Honda, K.; Yoshida, E.; Suardita, K.; Matsuda, Y.; Kato, Y.: Molecular cloning and characterization of DEC2, a new member of basic helix-loop-helix proteins. Biochem. Biophys. Res. Commun. 280: 164-171, 2001.
[6108] 211. Garriga-Canut, M.; Roopra, A.; Buckley, N. J.: The basic helix-loop-helix protein, SHARP-1, represses transcription by a histone deacetylase-dependent and histone deacetylase-independent mechanism. J. Biol. Chem. 276:14821-14828, 2001.
[6109] 212. Gu, H.; Saito, K.; Klaman, L. D.; Shen, J.; Fleming, T.; Wang, Y.-P.; Pratt, J. C.; Lin, G.; Lim, B.; Kinet, J.-P.; Neel, B. G.: Essential role for Gab2 in the allergic response. Nature 412: 186-190, 2001.
[6110] 213. Albrecht, U.; Sun, Z. S.; Eichele, G.; Lee, C. C.: A differential response to two putative mammalian circadian regulators, mper1 and mper2, to light. Cell 91: 1055-1064, 1997.
[6111] 214. Nagase, T.; Ishikawa, K.; Nakajima, D.; Ohira, M.; Seki, N.; Miyajima, N.; Tanaka, A.; Kotani, H.; Nomura, N.; Ohara, O.: Prediction of the coding sequences of unidentified human genes. VII. The complete sequences of 100 new cDNA clones from brain which can code for large proteins in vitro. DNA Res. 4: 141-150, 1997.
[6112] 215. Prueitt, R. L.; Ross, J. L.; Zinn, A. R.: Physical mapping of nine Xq translocation breakpoints and identification of XPNPEP2 as a premature ovarian failure candidate gene. Cytogenet. Cell Genet. 89:44-50, 2000.
[6113] 216. Sprinkle, T. J.; Stone, A. A.; Venema, R. C.; Denslow, N. D.; Caldwell, C.; Ryan, J. W.: Assignment of the membrane-bound human aminopeptidaseP gene (XPNPEP2) to chromosome Xq25. Genomics 50: 114-116, 1998.
[6114] 217. Venema, R. C.; Ju, H.; Zou, R.; Venema, V. J.; Ryan, J. W.: Cloning and tissue distribution of human membrane-bound aminopeptidase P. Biochim. Biophys. Acta 1354: 45-48, 1997.
[6115] 218. Ueki, N.; Oda, T.; Kondo, M.; Yano, K.; Noguchi, T.; Muramatsu, M.: Selection system for genes encoding nuclear-targeted proteins. Nat. Biotech. 16: 1338-1342, 1998.
[6116] 219. Ueki, N.; Seki, N.; Yano, K.; Masuho, Y.; Saito, T.; Muramatsu, M.: Isolation and characterization of a novel human gene (HFB30) which encodes a protein with a RING finger motif. Biochim. Biophys. Acta 232-236, 1999.
[6117] 220. Salbaum, J. M.: Genomic structure and chromosomal localization of the mouse gene Punc. Mammalian Genome 10: 107-111, 1999.
[6118] 221. Yang, W.; Li, C.; Mansour, S. L.: Impaired motor coordination in mice that lack punc. Molec. Cell. Biol. 21: 6031-6043, 2001.
[6119] 222. Fukuta, M.; Inazawa, J.; Torii, T.; Tsuzuki, K.; Shimada, E.; Habuchi, O.: Molecular cloning and characterization of human keratan sulfate gal-6-sulfotransferase. J. Biol. Chem. 272: 32321-32328, 1997.
[6120] 223. Iida, A.; Saito, S.; Sekine, A.; Mishima, C.; Kitamura, Y.; Kondo, K.; Harigae, S.; Osawa, S.; Nakamura, Y.: Catalog of 77 single-nucleotidepolymorphisms (SNPs) in the carbohydrate sulfotransferase 1 (CHST1) and carbohydrate sulfotransferase 3 (CHST3) genes. J. Hum. Genet. 47:14-19, 2002.
[6121] 224. Mazany, K. D.; Peng, T.; Watson, C. E.; Tabas, I.; Williams, K. J.: Human chondroitin 6-sulfotransferase: cloning, gene structure, and chromosomal localization. Biochim. Biophys. Acta 1407: 92-97, 1998.
[6122] 225. Ayres, J. A.; Shum, L.; Akarsu, A. N.; Dashner, R.; Takahashi, K.; Ikura, T.; Slavkin, H. C.; Nuckolls, G. H.: DACH: genomic characterization, evaluation as a candidate for postaxial polydactyly type A2, and developmental expression pattern of the mouse homologue. Genomics 77: 18-26, 2001.
[6123] 226. Davis, R. J.; Shen, W.; Sandler, Y. I.; Amoui, M.; Purcell, P.; Maas, R.; Ou, C.-N.; Vogel, H.; Beaudet, A. L.; Mardon, G.: Dachimutant mice bear no gross abnormalities in eye, limb, and brain development and exhibit postnatal lethality. Molec. Cell. Biol. 21: 1484-1490, 2001.
[6124] 227. Hammond, K. L.; Hanson, I. M.; Brown, A. G.; Lettice, L. A.; Hill, R. E.: Mammalian and Drosophila dachshund genes are related to the Ski proto-oncogene and are expressed in eye and limb. Mech. Dev. 74:121-131, 1998.
[6125] 228. Hammond, K. L.; Lettice, L. A.; Hill, R. E.; Lee, M.; Boyle, S.; Hanson, I. M.: Human (DACH) and mouse (Dach) homologues of Drosophila dachshund map to chromosomes 13q22 and 14E3, respectively. Genomics 55:252-253, 1999.
[6126] 229. Li, X.; Perissi, V.; Liu, F.; Rose, D. W.; Rosenfeld, M. G.: Tissue-specific regulation of retinal and pituitary precursor cell proliferation. Science 297:1180-1183, 2002.
[6127] 230. Blanco, G.; Irving, N. G.; Brown, S. D. M.; Miller, C. C. J.; McLoughlin, D. M.: Mapping of the human and murine X11-like genes (APBA2 and Apba2), the murine Fe65 gene (Apbb1), and the human Fe65-like gene (APBB2): genes encoding phosphotyrosine-binding domain proteins that-interact with the Alzheimer's disease amyloid precursor protein. Mammalian Genome 9: 473-475, 1998.
[6128] 231. Loh, N. Y.; Ambrose, H. J.; Guay-Woodford, L. M.; DasGupta, S.; Nawrotzki, R. A.; Blake, D. J.; Davies, K. E.: Genomic organization and refined mapping of the mouse beta-dystrobrevin gene. Mammalian Genome 9: 857-862, 1998.
[6129] 232. Peters, M. F.; O'Brien, K. F.; Sadoulet-Puccio, H. M.; Kunkel, L. M.; Adams, M. E.; Froehner, S. C.: Beta-dystrobrevin, a new member of the dystrophin family: identification, cloning, and protein associations. J. Biol. Chem. 272: 50:-31561-31569, 1997.
[6130] 233. Cavailles, V.; Dauvois, S.; Horset, L. F.; Lopez, G.; Hoare, S.; Kushner, P. J.; Parker, M. G.: Nuclear factor RIP140 modulates transcriptional activation by the estrogen receptor. EMBO J. 14: 3741-3751, 1995.
[6131] 234. Katsanis, N.; Ives, J. H.; Groet, J.; Nizetic, D.; Fisher, E. M. C.: Localisation of receptor interacting protein 140 (RIP140) within 100 kb of D21S13 on 21q11, a gene-poor region of the human genome. Hum. Genet. 102: 221-223, 1998.
[6132] 235. Baxendale, S.; MacDonald, M. E.; Mott, R.; Francis, F.; Lin, C.; Kirby, S. F.; James, M.; Zehetner, G.; Hummerich, H.; Valdes, J.; Collins, F. S.; Deaven, L. J.; Gusella, J. F.; Lehrach, H.; Bates, G. P.: A cosmid contig and high resolution restriction map of the 2 megabase region containing the Huntington's disease gene. Nature Genet. 4: 181-186, 1993.
[6133] 236. Richelda, R.; Ronchetti, D.; Baldini, L.; Cro, L.; Viggiano, L.; Marzella, R.; Rocchi, M.; Otsuki, T.; Lombardi, L.; Maiolo, A. T.; Neri, A.: A novel chromosomal translocation t(4;14)(p16.3;q32) in multiple myeloma involves the fibroblast growth-factor receptor 3 gene. Blood 90: 4062-4070, 1997.
[6134] 237. Wright, T. J.; Ricke, D. O.; Denison, K.; Abmayr, S.; Cotter, P. D.; Hirschhorn, K.; Keinanen, M.; McDonald-McGinn, D.; Somer, M.; Spinner, N.; Yang-Feng, T.; Zackai, E.; Altherr, M. R.: A transcript map of the newly defined 165 kb Wolf-Hirschhorn syndrome critical region. Hum. Molec. Genet. 6: 317-324, 1997.
[6135] 238. Borden, L. A.; Smith, K. E.; Gustafson, E. L.; Branchek, T. A.; Weinshank, R. L.: Cloning and expression of a betaine/GABA transporter from human brain. J. Neurochem. 64: 977-984, 1995.
[6136] 239. Rasola, A.; Galietta, L. J. V.; Barone, V.; Romeo, G.; Bagnasco, S.: Molecular cloning and functional characterization of a GABA/betaine transporter from human kidney. FEBS Lett. 373: 229-233, 1995.
[6137] 240. Yamauchi, A.; Uchida, S.; Kwon, H. M.; Preston, A. S.; Robey, R. B.; Garcia-Perez, A.; Burg, M. B.; Handler, J. S.: Cloning of a Na(+) and Cl(−)-dependent betaine transporter that is regulated by hypertonicity. J. Biol. Chem. 267: 649-652, 1992.
[6138] 241. Eisses, J. F.; Kaplan, J. H.: Molecular characterization of hCTR1, the human copper uptake protein. J. Biol. Chem. 277: 29162-29171, 2002.
[6139] 242. Klomp, A. E. M.; Tops, B. B. J.; van den Berg, I. E. T.; Berger, R.; Klomp, L. W. J.: Biochemical characterization and subcellular localization of human copper transporter 1 (hCTR1). Biochem. J. 364:497-505, 2002.
[6140] 243. Kuo, Y.-M.; Zhou, B.; Cosco, D.; Gitschier, J.: The copper transporter CTR1 provides an essential function in mammalian embryonic development. Proc. Nat. Acad. Sci. 98: 6836-6841, 2001.
[6141] 244. Lee, J.; Pena, M. M. O.; Nose, Y.; Thiele, D. J.: Biochemical characterization of the human copper transporter Ctrl. J. Biol. Chem. 277:4380-4387, 2002.
[6142] 245. Lee, J.; Prohaska, J. R.; Thiele, D. J.: Essential role for mammalian copper transporter Ctrl in copper homeostasis and embryonic development. Proc. Nat. Acad. Sci. 98: 6842-6847, 2001.
[6143] 246. Moller, L. B.; Petersen, C.; Lund, C.; Horn, N.: Characterization of the hCTR1 gene: genomic organization, functional expression, and identification of a highly homologous processed gene. Gene 257:13-22, 2000.
[6144] 247. Zhou, B.; Gitschier, J.: hCTR1: a human gene for copper uptake identified by complementation in yeast. Proc. Nat. Acad. Sci. 94:7481-7486, 1997.
[6145] 248. Amlal, H.; Burnham, C. E.; Soleimani, M.: Characterization of Na(+)/HCO(3-) cotransporter isoform NBC-3. Am. J. Physiol. 276:F903-F913, 1999.
[6146] 249. Burnham, C. E.; Wang, Z.; Soleimani, M.: Personal Communication. Cincinnati, Ohio. Jun. 1, 2000.
[6147] 250. Choi, I.; Aalkjaer, C.; Boulpaep, E. L.; Boron, W. F.: An electroneutral sodium/bicarbonate cotransporter NBCn1 and associated sodium channel. Nature 405:571-575, 2000.
[6148] 251. Ishibashi, K.; Sasaki, S.; Marumo, F.: Molecular cloning of anew sodium bicarbonate cotransporter cDNA from human retina. Biochem. Biophys. Res. Commun. 246: 535-538, 1998.
[6149] 252. Pushkin, A.; Abuladze, N.; Lee, I.; Newman, D.; Hwang, J.; Kurtz, I.: Mapping of the human NBC3 (SLC4A7) gene to chromosome 3p22. Genomics 57:321-322, 1999. Note: Correction: Genomics 58: 216 and 321-322, 1999.
[6150] 253. Pushkin, A.; Abuladze, N.; Lee, I.; Newman, D.; Hwang, J.; Kurtz, I.: Cloning, tissue distribution, genomic organization, and functional characterization of NBC3, a new member of the sodium bicarbonate cotransporter-family. J. Biol. Chem. 274: 16569-16575, 1999.
[6151] 254. Alimova-Kost, M. V.; Imreh, S.; Buchman, V. L.; Ninkina, N. N.: Assignment of phosphotriesterase-related gene (PTER) to human chromosome band 10p12 by in situ hybridization. Cytogenet. Cell Genet. 83:16-17, 1998.
[6152] 255. Davies, J. A.; Buchman, V. L.; Krylova, O.; Ninkina, N. N.: Molecular cloning and expression pattern of rpr-1, a resiniferatoxin-binding, phosphotriesterase-related protein, expressed in rat kidney tubules. FEBS Lett. 410: 378-382, 1997.
[6153] 256. Pillutla, R. C.; Shimamoto, A.; Furuichi, Y.; Shatkin, A. J.: Human mRNA capping enzyme (RNGTT) and cap methyltransferase (RNMT) map to 6q16 and 18p11.22-p11.23, respectively. Genomics 54: 351-353, 1998.
[6154] 257. Ishikawa, K.; Nagase, T.; Nakajima, D.; Seki, N.; Ohira, M.; Miyajima, N.; Tanaka, A.; Kotani, H.; Nomura, N.; Ohara, O.: Prediction of the coding sequences of unidentified human genes. VIII. 78 new cDNA clones from brain which code for large proteins in vitro. DNA Res. 4:307-313, 1997.
[6155] 258. Pillutla, R. C.; Yue, Z.; Maldonado, E.; Shatkin, A. J.: Recombinant human mRNA cap methyltransferase binds capping enzyme/RNA polymerasello complexes. J. Biol. Chem. 273: 21443-21446, 1998.
[6156] 259. Tsukamoto, T.; Shibagaki, Y.; Niikura, Y.; Mizumoto, K.: Cloning and characterization of three human cDNAs encoding mRNA (guanine-7)-methyltransferase, an mRNA cap methylase. Biochem. Biophys. Res. Commun. 251: 27-34, 1998.
[6157] 260. McLoughlin, D. M.; Miller, C. C. J.: The intracellular cytoplasmic domain of the Alzheimer's disease amyloid precursor protein interacts with phosphotyrosine-binding domain proteins in the yeast two-hybrid system. FEBS Lett. 397: 197-200, 1996.
[6158] 261. Guenette, S. Y.; Chen, J.; Jondro, P. D.; Tanzi, R. E.: Association of a novel human FE65-like protein with the cytoplasmic domain of the beta-amyloid precursor protein. Proc. Nat. Acad. Sci. 93: 10832-10837, 1996.
[6159] 262. Howard, L.; Nelson, K. K.; Maciewicz, R. A.; Blobel, C. P.: Interaction of the metalloprotease disintegrins MDC9 and MDC15 with two SH3 domain-containing proteins, endophilin I and SH3PX1. J. Biol. Chem. 274: 31693-31699, 1999.
[6160] 263. Galliano, M.-F.; Huet, C.; Frygelius, J.; Polgren, A.; Wewer, U. M.; Engvall, E.: Binding of ADAM12, a marker of skeletal muscle regeneration, to the muscle-specific actin-binding protein, alpha-actinin-2, is required for myoblast fusion. J. Biol. Chem. 275: 13933-13939, 2000.
[6161] 264. Gilpin, B. J.; Loechel, F.; Mattei, M.-G.; Engvall, E.; Albrechtsen, R.; Wewer, U. M.: A novel, secreted form of human ADAM 12 (meltrinalpha) provokes myogenesis in vivo. J. Biol. Chem. 273: 157-166, 1998.
[6162] 265. Yagami-Hiromasa, T.; Sato, T.; Kurisaki, T.; Kamijo, K.; Nabeshima, Y.; Fujisawa-Sehara, A.: A metalloprotease-disintegrin participating in myoblast fusion. Nature 377: 652-656, 1995.
[6163] 266. Cheng, G.; Ye, Z.-S.; Baltimore, D.: Binding of Bruton's tyrosinekinase to Fyn, Lyn, or Hck through a Src homology 3 domain-mediated interaction. Proc. Nat. Acad. Sci. 91: 8152-8155, 1994.
[6164] 267. Gibson, S.; Leung, B.; Squire, J. A.; Hill, M.; Arima, N.; Goss, P.; Hogg, D.; Mills, G. B.: Identification, cloning, and characterization of a novel human T-cell-specific tyrosine kinase located at the hematopoietin complex on chromosome 5q. Blood 82: 1561-1572, 1993.
[6165] 268. Janis, E. M.; Siliciano, J. D.; Isaac, D. D.; Griffin, C. A.; Hawkins, A. L.; Kozak, C. A.; Desiderio, S.: Mapping of the gene for the tyrosinekinase Itk to a region of conserved synteny between mouse chromosome 11 and human chromosome 5q. Genomics 23: 269-271, 1994.
[6166] 269. Schaeffer, E. M.; Debnath, J.; Yap, G.; McVicar, D.; Liao, X. C.; Littman, D. R.; Sher, A.; Varmus, H. E.; Lenardo, M. J.; Schwartzberg, P. L.: Requirement for Tec kinases Rlk and Itk in T cell receptor signaling and immunity. Science 284: 638-641, 1999.
[6167] 270. Woods, M. L.; Kivens, W. J.; Adelsman, M. A.; Qiu, Y.; August, A.; Shimizu, Y.: A novel function for the Tec family tyrosine kinase Itk in activation of beta-1 integrins by the T-cell receptor. EMBO J. 20: 1232-1244, 2001.
[6168] 271. Bisbal, C.; Martinand, C.; Silhol, M.; Lebleu, B.; Salehzada, T.: Cloning and characterization of a RNase L inhibitor: a new component of the interferon-regulated 2-5A pathway. J. Biol. Chem. 270: 13308-13317, 1995.
[6169] 272. Tong, Q.; Xing, S.; Jhiang, S. M.: Leucine zipper-mediated dimerization is essential for the PTC1 oncogenic activity. J. Biol. Chem. 272:9043-9047, 1997.
[6170] 273. Orstavik, S.; Natarajan, V.; Tasken, K.; Jahnsen, T.; Sandberg, M.: Characterization of the human gene encoding the type I-alpha and type I-beta cGMP-dependent protein kinase (PRKG1). Genomics 42:311-318, 1997.
[6171] 274. Orstavik, S.; Sandberg, M.; Berube, D.; Natarajan, V.; Simard, J.; Walter, U.; Gagne, R.; Hansson, V.; Jahnsen, T.: Localization of the human gene for type I cyclic GMP dependent protein kinase to chromosome 10. Cytogenet. Cell Genet. 59: 270-273, 1992.
[6172] 275. Osborne, K. A; Robichon, A.; Burgess, E.; Butland, S.; Shaw, R. A.; Coulthard, A.; Pereira, H. S.; Greenspan, R. J.; Sokolowski, M. B.: Natural behavior polymorphism due to a cGMP-dependent protein kinase of Drosophila. Science 277: 834-836, 1997.
[6173] 276. Pfeifer, A.; Klatt, P.; Massberg, S.; Ny, L.; Sausbier, M.; Hirneill, C.; Wang, G.-X.; Korth, M.; Aszodi, A.; Andersson, K.-E.; Krombach, F.; Mayerhofer, A.; Ruth, P.; Fassler, R.; Hofmann, F.: Defective smooth muscle regulation in cGMP kinase I-deficient mice. EMBO J. 17:3045-3051, 1998.
[6174] 277. Sandberg, M.; Natarajan, V.; Ronander, I.; Kalderon, D.; Walter, U.; Lohmann, S. M.; Jahnsen, T.: Molecular cloning and predicted full-length amino acid sequence of the type I beta isozyme of cGMP-dependent protein kinase from human placenta: tissue distribution and developmental changes in rat. FEBS Lett. 255: 321-329, 1989.
[6175] 278. Tamura, N.; Itoh, H.; Ogawa, Y.; Nakagawa, O.; Harada, M.; Chun, T.-H.; Suga, S.; Yoshimasa, T.; Nakao, K.: cDNA cloning and gene expression of human type I-alpha cGMP-dependent protein kinase. Hypertension 27:552-557, 1996.
[6176] 279. Oyen, O.; Myklebust, F.; Scott, J. D.; Hansson, V.; Jahnsen, T.: Human testis cDNA for the regulatory subunit RII alpha of cAMP-dependent protein kinase encodes an alternate amino-terminal region. FEBS Lett. 246:57-64, 1989.
[6177] 280. Tasken, K.; Naylor, S. L.; Solberg, R.; Jahnsen, T.: Mapping of the gene encoding the regulatory subunit RII-alpha of cAMP-dependent protein kinase (locus PRKAR2A) to human chromosome region 3p21.3-p21.2. Genomics 50:378-381, 1998.
[6178] 281. Solberg, R.; Sistonen, P.; Traskelin, A.-L.; Berube, D.; Simard, J.; Krajci, P.; Jahnsen, T.; de la Chapelle, A.: Mapping of the regulatory subunits RI-beta and RII-beta of cAMP-dependent protein kinase genes on human chromosome 7. Genomics 14: 63-69, 1992.
[6179] 282. Cummings, D. E.; Brandon, E. P.; Planas, J. V.; Motamed, K.; Idzerda, R. L.; McKnight, G. S.: Genetically lean mice result from targeted disruption of the RII-beta subunit of protein kinase A. Nature 382::622-626, 1996.
[6180] 283. Scambler, P.; Oyen, O.; Wainwright, B.; Farrall, M.; Law, H.-Y.; Estivill, X.; Sandberg, M.; Williamson, R.; Jahnsen, T.: Exclusion of catalytic and regulatory subunits of cAMP-dependent protein kinase as candidate genes for the defect causing cystic fibrosis. Am. J. Hum. Genet. 41: 925-932, 1987.
[6181] 284. Wainwright, B.; Lench, N.; Davies, K.; Scambler, P.; Kruyer, H.; Williamson, R.; Jahnsen, T.; Farrall, M.: A human regulatory subunit of type II cAMP-dependent protein kinase localized by its linkage relationship to several cloned chromosome 7q markers. Cytogenet. Cell Genet. 45: 237-239, 1987.
[6182] 285. Akiyama, K.; Yokota, K.; Kagawa, S.; Shimbara, N.; Tamura, T.; Akioka, H.; Nothwang, H. G.; Noda, C.; Tanaka, K.; Ichihara, A.: cDNA cloning and interferon gamma down-regulation of proteasomal subunits X and Y. Science 265: 1231-1234, 1994.
[6183] 286. Driscoll, J.; Brown, M. G.; Finley, D.; Monaco, J. J.: MHC-linked LMP gene products specifically alter peptidase activities of the proteasome. Nature 365:262-264, 1993.
[6184] 287. Gaczynska, M.; Rock, K. L.; Goldberg, A. L.: Gamma interferon and expression of MHC genes regulate peptide hydrolysis by proteasomes. Nature 365:264-267, 1993.
[6185] 288. Glynne, R.; Powis, S. H.; Beck, S.; Kelly, A.; Kerr, L. A.; Trowsdale, J.: A proteasome-related gene between the two ABC transporter loci in the class II region of the human MHC. Nature 353: 357-360, 1991.
[6186] 289. Lin, K.; Thomas, J. T.; McBride, O. W.; Luyten, F. P.: Assignment of a new TGF-beta superfamily member, human cartilage-derived morphogenetic protein-1, to chromosome 20q11.2. Genomics 34: 150-151, 1996.
[6187] 290. To be, T.; Minoshima, S.; Yamase, S.; Choi, N.-H.; Tomita, M.; Shimizu, N.: Assignment of a human serum glycoprotein SP-40,40 gene (CLI) to chromosome 8. Cytogenet. Cell Genet. 57: 193-195, 1991.
[6188] 291. Wong, P.; Pineault, J.; Lakins, J.; Taillefer, D.; Leger, J.; Wang, C.; Tenniswood, M.: Genomic organization and expression of the rat TRPM-2 (clusterin) gene, a gene implicated in apoptosis. J. Biol. Chem. 268: 5021-5031, 1993.
[6189] 292. Wong, P.; Taillefer, D.; Lakins, J.; Pineault, J.; Chader, G.; Tenniswood, M.: Molecular characterization of human TRPM-2/clusterin, a gene associated with sperm maturation, apoptosis and neurodegeneration. Europ. J. Biochem. 221: 917-925, 1994.
[6190] 293. Phillips, S. A.; Barr, V. A.; Haft, D. H.; Taylor, S. I.; Haft, C. R.: Identification and characterization of SNX15, a novel sortingnexin involved in protein trafficking. J. Biol. Chem. 276: 5074-5084, 2001.
[6191] 294. Roberts, W. M.; Look, A. T.; Ruossel, M. F.; Sherr, C. J.: Tandem linkage of human CSF-1 receptor (c-fms) and PDGF receptor genes. Cell 55:655-661, 1988.
[6192] 295. Smith, E. A.; Seldin, M. F.; Martinez, L.; Watson, M. L.; GhoshChoudhury, G.; Lalley, P. A.; Pierce, J.; Aaronson, S.; Barker, J.; Naylor, S. L.; Sakaguchi, A. Y.: Mouse platelet-derived growth factor receptor alpha gene is deleted in W-19H and patch mutations on chromosomes. Proc. Nat. Acad. Sci. 88: 4811-4815, 1991.
[6193] 296. Stenman, G.; Eriksson, A.; Claesson-Welsh, L.: Human PDGFA receptor gene maps to the same region on chromosome 4 as the KIT oncogene. Genes Chromosomes Cancer 1: 155-158, 1989.
[6194] 297. Stephenson, D. A.; Mercola, M.; Anderson, E.; Wang, C.; Stiles, C. D.; Bowen-Pope, D. F.; Chapman, V. M.: Platelet-derived growth factor receptor alpha-subunit gene (Pdgfra) is deleted in the mouse patch (Ph) mutation. Proc. Nat. Acad. Sci. 88: 6-10, 1991.
[6195] 298. Xie, J.; Aszterbaum, M.; Zhang, X.; Bonifas, J. M.; Zachary, C.; Epstein, E.; McCormick, F.: A role of PDGFR-alpha in basal cell carcinoma proliferation. Proc. Nat. Acad. Sci. 98: 9255-9259, 2001.
[6196] 299. Moog-Lutz, C.; Bouillet, P.; Regnier, C. H.; Tomasetto, C.; Mattei, M. G.; Chenard, M. P.; Anglard, P.; Rio, M. C.; Basset, P.: Comparative expression of the psoriasin (S100A7) and S100C genes in breast carcinoma and colocalization to human chromosome 1q21-q22. Int. J. Cancer 63:297-303, 1995.
[6197] 300. Tanaka, M.; Adzuma, K.; Iwami, M.; Yoshimoto, K.; Monden, Y.; Itakura, M.: Human calgizzarin: one colorectal cancer-related gene selected by a large scale random cDNA sequencing and northern blot analysis. Cancer Lett. 89: 195-200, 1995.
[6198] 301. Todoroki, H.; Kobayashi, R.; Watanabe, M.; Minami, H.; Hidaka, H.: Purification, characterization, and partial sequence analysis of a newly identified EF-hand type 13-kDa Ca(2+)-binding protein from smooth muscle and non-muscle tissues. J. Biol. Chem. 266: 18668-18673, 1991.
[6199] 302. Watanabe, M.; Ando, Y.; Todoroki, H.; Minami, H.; Hidaka, H.: Molecular cloning and sequencing of a cDNA clone encoding a new calcium binding protein, named calgizzarin, from rabbit lung. Biochem. Biophys. Res. Commun. 181: 644-649, 1991.
[6200] 303. Sullivan, J. L.; Byron, K. S.; Brewster, F. E.; Baker, S. M.; Ochs, H. D.: X-linked lymphoproliferative syndrome: natural history of the immunodeficiency. J. Clin. Invest. 71: 1765-1778, 1983.
[6201] 304. Sullivan, J. L.; Byron, K. S.; Brewster, F. E.; Purtilo, D. T.: Deficient natural killer cell activity in X-linked lymphoproliferative syndrome. Science 210: 543-545, 1980.
[6202] 305. Sumazaki, R.; Kanegane, H.; Osaki, M.; Fukushima, T.; Tsuchida, M.; Matsukura, H.; Shinozaki, K.; Kimura, H.; Matsui, A.; Miyawaki, T.: SH2D1A mutations in Japanese males with severe Epstein-Barr virus-associated illnesses. Blood 98: 1268-1270, 2001.
[6203] 306. Sumegi, J.; Gross, T. G.; Seemayer, T. A.: The molecular genetics of X-linked lymphoproliferative (Duncan's) disease. Cancer, J. Sci. Am. 5: 57-62, 1999.
[6204] 307. Sumegi, J.; Huang, D.; Lanyi, A.; Davis, J. D.; Seemayer, T. A.; Maeda, A.; Klein, G.; Seri, M.; Wakiguchi, H.; Purtilo, D. T.; Gross, T. G.: Correlation of mutations of the SH2D1A gene and Epstein-Barr virus infection with clinical phenotype and outcome in X-linked lymphoproliferative disease. Blood 96: 3118-3125, 2000.
[6205] 308. Xiang, X.; Benson, K. F.; Chada, K.: Mini-mouse: disruption of the pygmy locus in a transgenic insertional mutant. Science 247:967-969, 1990.
[6206] 309. Scriver, C. R.: Vitamin B6 deficiency and dependency in man. Am. J. Dis. Child. 113: 109-114, 1967.
[6207] 310. Scriver, C. R.; Hutchison, J. H.: The vitamin B6 deficiency syndrome in human infancy: biochemical and clinical observations. Pediatrics 31:240-250, 1963.
[6208] 311. Uchida, T.; Fujimori, F.; Tradler, T.; Fischer, G.; Rahfeld, J.-U.: Identification and characterization of a 14 kDa human protein as a novel parvulin-like peptidyl prolyl cis/trans isomerase. FEBS Lett. 446:278-282, 1999.
[6209] 312. Shearman, L. P.; Sriram, S.; Weaver, D. R.; Maywood, E. S.; Chaves, I.; Zheng, B.; Kume, K.; Lee, C. C.; van der Horst, G. T. J.; Hastings, M. H.; Reppert, S. M.: Interacting molecular loops in the mammalian circadian clock. Science 288: 1013-1019, 2000.
[6210] 313. Charlier, C.; Coppieters, W.; Farnir, F.; Grobet, L.; Leroy, P. L.; Michaux, C.; Mni, M.; Schwers, A.; Vanmanshoven, P.; Hanset, R.; Georges, M.: The mh gene causing double-muscling in cattle maps to bovine chromosome 2. Mammalian Genome 6: 788-792, 1995.
[6211] 314. Ferrell, R. E.; Conte, V.; Lawrence, E. C.; Roth, S. M.; Hagberg, J. M.; Hurley, B. F.: Frequent sequence variation in the human myostatin (GDF8) gene as a marker for analysis of muscle-related phenotypes. Genomics 62:203-207, 1999.
[6212] 315. Gonzalez-Cadavid, N. F.; Taylor, W. E.; Yarasheski, K.; Sinha-Hikim, I.; Ma, K.; Ezzat, S.; Shen, R.; Lalani, R.; Asa, S.; Mamita, M.; Nair, G.; Arver, S.; Bhasin, S.: Organization of the human myostatin gene and expression in healthy men and HIV-infected men with muscle wasting. Proc. Nat. Acad. Sci. 95: 14938-14943, 1998.
[6213] 316. Grobet, L.; Martin, L. J. R.; Poncelet, D.; Pirottin, D.; Brouwers, B.; Riquet, J.; Schoeberlein, A.; Dunner, S.; Menissier, F.; Massabanda, J.; Fries, R.; Hanset, R.; Georges, M.: A deletion in the bovine myostatin gene causes the double-muscled phenotype in cattle. Nature Genet. 17: 71-74, 1997.
[6214] 317. Chikuba, K.; Yubisui, T.; Shirabe, K.; Takeshita, M.: Cloning and nucleotide sequence of a cDNA of the human erythrocyte NADPH-flavin reductase. Biochem. Biophys. Res. Commun. 198: 1170-1176, 1994.
[6215] 318. Saito, F.; Yamaguchi, T.; Komuro, A.; To be, T.; Ikeuchi, T.; Tomita, M.; Nakajima, H.: Mapping of the newly identified biliverdin-IX beta-reductase gene (BLVRB) to human chromosome 19q13.13-q13.2 by fluorescence in situ hybridization. Cytogenet. Cell Genet. 71: 179-181, 1995.
[6216] 319. Yamaguchi, T.; Komuro, A.; Nakano, Y.; Tomita, M.; Nakajima, H.: Complete amino acid sequence of biliverdin-IX beta reductase from human liver. Biochem. Biophys. Res. Commun. 197: 1518-1523, 1993.
[6217] 320. Kosaki, K.; Bassi, M. T.; Kosaki, R.; Lewin, M.; Belmont, J.; Schauer, G.; Casey, B.: Characterization and mutation analysis of human LEFTYA and LEFTY B, homologues of murine genes implicated in left-right axis development. Am. J. Hum. Genet. 64: 712-721, 1999.
[6218] 321. Kothapalli, R.; Buyuksal, I.; Wu, S.-Q.; Chegini, N.; Tabibzadeh, S.: Detection of ebaf, a novel human gene of the transforming growth factor beta superfamily: association of gene expression with endometrial bleeding. J. Clin. Invest. 99: 2342-2350, 1997.
[6219] 322. Meno, C.; Itoh, Y.; Saijoh, Y.; Matsuda, Y.; Tashiro, K.; Kuhara, S.; Hamada, H.: Two closely-related left-right asymmetrically expressed genes, lefty-1 and lefty-2: their distinct expression domains, chromosomal linkage and direct neuralizing activity in Xenopus embryos. Genes Cells 2: 513-524, 1997.
[6220] 323. Meno, C.; Saijoh, Y.; Fujii, H.; Ikeda, M.; Yokoyama, T.; Yokoyama, M.; Toyoda, Y.; Hamada, H.: Left-right asymmetric expression of the TGF-beta-family member lefty in mouse embryos. Nature 381: 151-155, 1996.
[6221] 324. Meno, C.; Shimono, A.; Saijoh, Y.; Yashiro, K.; Mochida, K.; Ohishi, S.; Noji, S.; Kondoh, H.; Hamada, H.: Lefty-1 is required for left-right determination as a regulator of lefty-2 and nodal. Cell 94: 287-297, 1998.
[6222] 325. Tabibzadeh, S.; Mason, J. M.; Shea, W.; Cai, Y.; Murray, M. J.; Lessey, B.: Dysregulated expression of ebaf, a novel molecular defectin the endometria of patients with infertility. J. Clin. Endocr. Metab. 85: 2526-2536, 2000.
[6223] 326. Kamitani, T.; Chang, H.-M.; Rollins, C.; Waneck, G. L.; Yeh, E. T. H.: Correction of the class A defect in glycosylphosphatidylinositol anchor biosynthesis in Ltk-cells by human cDNA clone. J. Biol. Chem. 268:20733-20736, 1993.
[6224] 327. Cirullo, R. E.; Arredondo-Vega, F. X.; Smith, M.; Wasmuth, J. J.: Isolation and characterization of interspecific heat-resistant hybrids between a temperature-sensitive Chinese hamster cell asparaginyl-tRNA synthetase mutant and normal human leukocytes: assignment of human asnS gene to chromosome 18. Somat. Cell Genet. 9: 215-233, 1983.
[6225] 328. Shows, T. B.: Personal Communication. Buffalo, N.Y. Jan. 11, 1983.
[6226] 329. Lin, S.-C.; Lin, C. R.; Gukovsky, I.; Lusis, A. J.; Sawchenko, P. E.; Rosenfeld, M. G.: Molecular basis of the little mouse phenotype and implications for cell type-specific growth. Nature 364: 208-213, 1993.
[6227] 330. Itoh, H.; Tomita, M.; Uchino, H.; Kobayashi, T.; Kataoka, H.; Sekiya, R.; Nawa, Y.: cDNA cloning of rat pS2 peptide and expression of trefoil peptides in acetic acid-induced colitis. Biochem. J. 318: 939-944, 1996.
[6228] 331. Seib, T.; Blin, N.; Hilgert, K.; Seifert, M.; Theisinger, B.; Engel, M.; Dooley, S.; Zang, K.-D.; Welter, C.: The three human trefoil genes TFF1, TFF2, and TFF3 are located within a region of 55 kb on chromosome 21q22.3. Genomics 40: 200-202, 1997.
[6229] 332. Hruban, R. H.; Goggins, M.; Parsons, J.; Kern, S. E.: Clin. Cancer Res. 6: 2969-2972, 2000.
[6230] 333. Hruban, R. H.; van Mansfield, A. D. M.; Offerhaus, G. J. A.; van Weering, D. H. J.; Allison, D. C.; Goodman, S. N., Kensler, T. W.; Bose, K. K.; Cameron, J. L.; Bos, J. L.: Am. J. Path. 143: 545-554, 1993.
[6231] 334. Hruban, R. H.; Wilentz, R. E.; Kern, S. E.: Am. J. Pathol. 156:1821-1825, 2000.
[6232] 335. Fazioli, F.; Minichiello, L.; Matoska, V.; Castagnino, P.; Miki, T.; Wong, W. T.; Di Fiore, P. P.: Eps8, a substrate for the epidermal growth factor receptor kinase, enhances EGF-dependent mitogenic signals. EMBO J. 12: 3799-3808, 1993.
[6233] 336. Kumar, S.; Tomooka, Y.; Noda, M.: Identification of a set of genes with developmentally down-regulated expression in the mouse brain. Biochem. Biophys. Res. Commun. 185: 1155-1161, 1992.
[6234] 337. Braybrooke, J. P.; Spink, K. G.; Thacker, J.; Hickson, I. D.: The RAD51 family member, RAD51L3, is a DNA-stimulated ATPase that forms a complex with XRCC2. J. Biol. Chem. 275: 29100-29106, 2000.
[6235] 338. Johnson, R. D.; Liu, N.; Jasin, M.: Mammalian XRCC2 promotes there pair of DNA double-str and breaks by homologous recombination. Nature 401:397-399, 1999.
[6236] 339. Jones, N. J.; Cox, R.; Thacker, J.: Isolation and cross-sensitivity of x-ray-sensitive mutants of V79-4 hamster cells. Mutat. Res. 183:279-286, 1987.
[6237] 340. Jones, N. J.; Zhao, Y.; Siciliano, M. J.; Thompson, L. H.: Assignment of the XRCC2 human DNA repair gene to chromosome 7q36 by complementation analysis. Genomics 26: 619-622, 1995.
[6238] 341. Kurumizaka, H.; Ikawa, S.; Nakada, M.; Enomoto, R.; Kagawa, W.; Kinebuchi, T.; Yamazoe, M.; Yokoyama, S.; Shibata, T.: Homologous pairing and ring and filament structure formation activities of the human Xrcc2-Rad51D complex. J. Biol. Chem. 277: 14315-14320, 2002.
[6239] 342. Liu, N.; Schild, D.; Thelen, M. P.; Thompson, L. H.: Involvement of Rad51C in two distinct protein complexes of Rad51 paralogs in human cells. Nucleic Acids Res. 30: 1009-1015, 2002.
[6240] 343. Masson, J.-Y.; Tarsounas, M. C.; Stasiak, A. Z.; Stasiak, A.; Shah, R.; Mcllwraith, M. J.; Benson, F. E.; West, S. C.: Identification and purification of two distinct complexes containing the five RAD51 paralogs. Genes Dev. 15: 3296-3307, 2001.
[6241] 344. Tambini, C. E.; George, A. M.; Rommens, J. M.; Tsui, L.-C.; Scherer, S. W.; Thacker, J.: The XRCC2 DNA repair gene: identification of a positional candidate. Genomics 41: 84-92, 1997.
[6242] 345. Thacker, J.; Tambini, C. E.; Simpson, P. J.; Tsui, L.-C.; Scherer, S. W.: Localization to chromosome 7q36.1 of the human XRCC2 gene, determining sensitivity to DNA-damaging agents. Hum. Molec. Genet. 4:113-120, 1995.
[6243] 346. Nakagawara, A.; Liu, X.-G.; Ikegaki, N.; White, P. S.; Yamashiro, D. J.; Nycum, L. M.; Biegel, J. A.; Brodeur, G. M.: Cloning and chromosomal localization of the human TRKB tyrosine kinase receptor gene (NTRK2). Genomics 25:538-546, 1995.
[6244] 347. Rico, B.; Xu, B.; Reichardt, L. F.: TrkB receptor signaling is required for establishment of GABAergic synapses in the cerebellum. Nature Neurosci. 5: 225-233, 2002.
[6245] 348. Slaugenhaupt, S. A.; Blumenfeld, A.; Liebert, C. B.; Mull, J.; Lucente, D. E.; Monahan, M.; Breakefield, X. O.; Maayan, C.; Parada, L.; Axelrod, F. B.; Gusella, J. F.: The human gene for neurotrophic tyrosine kinase receptor type 2 (NTRK2) is located on chromosome 9 but is not the familial dysautonomia gene. Genomics 25: 730-732, 1995.
[6246] 349. Soppet, D.; Escandon, E.; Maragos, J.; Middlemas, D. S.; Reid, S. W.; Blair, J.; Burton, L. E.; Stanton, B. R.; Kaplan, D. R.; Hunter, T.; Nikolics, K.; Parada, L. F.: The neurotrophic factors brain-derived neurotrophic factor and neurotrophin-3 are ligands for the trkB tyrosinekinase receptor. Cell 65: 895-903, 1991.
[6247] 350. Squinto, S. P.; Stitt, S. N.; Aldrich, T. H.; Davis, S.; Bianco, S. M.; Radziejewski, C.; Glass, D. J.; Masiakowski, P.; Furth, M. E.; Valenzuela, D. M.; DiStefano, P. S.; Yancopoulos, G. D.: trkBencodes a functional receptor for brain-derived neurotrophic factor and neurotrophin-3 but not nerve growth factor. Cell 65: 885-893, 1991.
[6248] 351. Burks, D. J.; Font de Mora, J.; Schubert, M.; Withers, D. J.; Myers, M. G.; Towery, H. H.; Altamuro, S. L.; Flint, C. L.; White, M. F.: IRS-2 pathways integrate female reproduction and energy homeostasis. Nature 407:377-382, 2000.
[6249] 352. Fritsche, A.; Madaus, A.; Renn, W.; Tschritter, O.; Teigeler, A.; Weisser, M.; Maerker, E.; Machicao, F.; Haring, H.; Stumvoll, M.: The prevalent Gly1057Asp polymorphism in the insulin receptor substrate-2 gene is not associated with impaired insulin secretion. J. Clin. Endocr. Metab. 86: 4822-4825, 2001.
[6250] 353. Kubota, N.; To be, K.; Terauchi, Y.; Eto, K.; Yamauchi, T.; Suzuki, R.; Tsubamoto, Y.; Komeda, K.; Nakano, R.; Miki, H.; Satoh, S.; Sekihara, H.; Sciacchitano, S.; Lesniak, M.; Aizawa, S.; Nagai, R.; Kimura, S.; Akanuma, Y.; Taylor, S. I.; Kadowaki, T.: Disruption of insulin receptor substrate 2 causes type 2 diabetes because of liver insulin resistance and lack of compensatory beta-cell hyperplasia. Diabetes 49::-1880-1889, 2000.
[6251] 354. Sun, X. J.; Wang, L.-M.; Zhang, Y.; Yenush, L.; Myers, M. G., Jr.; Glasheen, E.; Lane, W. S.; Pierce, J. H.; White, M. F.: Role of IRS-2 in insulin and cytokine signalling. Nature 377: 173-177, 1995.
[6252] 355. Withers, D. J.; Burks, D. J.; Towery, H. H.; Altamuro, S. L.; Flint, C. L.; White, M. F.: Irs-2 coordinates Igf-1 receptor-mediated beta-cell development and peripheral insulin signalling. Nature Genet. 23:32-40, 1999.
[6253] 356. Withers, D. J.; Gutierrez, J. S.; Towery, H.; Burks, D. J.; Ren, J.-M.; Previs, S.; Zhang, Y.; Bernal, D.; Pons, S.; Shulman, G. I.; Bonner-Weir, S.; White, M. F.: Disruption of IRS-2 causes type 2 diabetes in mice. Nature 391: 900-902, 1998.
[6254] 357. Wong, W. T.; Carlomagno, F.; Druck, T.; Barletta, C.; Croce, C. M.; Huebner, K.; Kraus, M. H.; Di Fiore, P. P.: Evolutionary conservation of the EPS8 gene and its mapping to human chromosome 12q23-q24. Oncogene 9:3057-3061, 1994.
[6255] 358. Peters, M. A.; Ostrander, E. A.: Prostate cancer: more than two to tango. Nature Genet. 27: 134-135, 2001.
[6256] 359. Chen, S. L.; Dowhan, D. H.; Hosking, B. M.; Muscat, G. E. O.: The steroid receptor coactivator, GRIP-1, is necessary for MEF-2C-dependent gene expression and skeletal muscle differentiation. Genes Dev. 14:1209-1228, 2000.
[6257] 360. Yoshida, M. C.; Sasaki, M.; Mise, K.; Semba, K.; Nishizawa, M.; Yamamoto, T.; Toyoshima, K.: Regional mapping of the human proto-oncogene c-yes-1 to chromosome 18 at band q21.3. Jpn. J. Cancer Res. 76:559-562, 1985.
[6258] 361. Goossens, M.; Brauner, R.; Czernichow, P.; Duquesnoy, P.; Rappaport, R.: Isolated growth hormone (GH) deficiency type 1A associated with a double deletion in the human GH gene cluster. J. Clin. Endocr. Metab. 62: 712-716, 1986.
[6259] 362. Cool, D. R.; Normant, E.; Shen, F.; Chen, H.-C.; Pannell, L.; Zhang, Y.; Loh, Y. P.: Carboxypeptidase E is a regulated secretory pathway sorting receptor: genetic obliteration leads to endocrine disorders in Cpe(fat) mice. Cell 88: 73-83, 1997.
[6260] 363. Nicoloso, M.; Caizergues-Ferrer, M.; Michot, B.; Azum, M.-C.; Bachellerie, J.-P.: U20, a novel small nucleolar RNA, is encoded in an intron of the nucleolin gene in mammals. Molec. Cell. Biol. 14: 5766-5776, 1994.
[6261] 364. Srivastava, M.; Fleming, P. J.; Pollard, H. B.; Burns, A. L.: Cloning and sequencing of the human nucleolin cDNA. FEBS Lett. 250:99-105, 1989.
[6262] 365. Srivastava, M.; McBride, O. W.; Fleming, P. J.; Pollard, H. B.; Burns, A. L.: Genomic organization and chromosomal localization of the human nucleolin gene. J. Biol. Chem. 265: 14922-14931, 1990.
[6263] 366. Campbell, G. R.; Zimmerman, K.; Blank, R. D.; Alt, F. W.; D'Eustachio, P.: Chromosomal location of N-myc and L-myc genes in the mouse. Oncogene Res. 4: 47-54, 1989.
[6264] 367. Bahou, W. F.; Nierman, W. C.; Durkin, A. S.; Potter, C. L.; Demetrick, D. J.: Chromosomal assignment of the human thrombin receptor gene: localization to region q13 of chromosome 5. Blood 82: 1532-1537, 1993.
[6265] 368. Coughlin, S. R.; Vu, T.-K. H.; Hung, D. T.; Wheaton, V. I.: Characterization of a functional thrombin receptor: issues and opportunities. J. Clin. Invest. 89: 351-355, 1992.
[6266] 369. Griffin, C. T.; Srinivasan, Y.; Zheng, Y.-W.; Huang, W.; Coughlin, S. R.: A role for thrombin receptor signaling in endothelial cells during embryonic development. Science 293: 1666-1670, 2001.
[6267] 370. Poirier, C.; O'Brien, E. P.; Bueno Brunialti, A. L.; Chambard, J.-C.; Swank, R. T.; Guenet, J.-L.: The gene encoding the thrombin receptor (Cf2r) maps to mouse chromosome 13. Mammalian Genome 7:322, 1996.
[6268] 371. Schmidt, V. A.; Nierman, W. C.; Feldblyum, T. V.; Maglott, D. R.; Bahou, W. F.: The human thrombin receptor and proteinase activated receptor-2 genes are tightly linked on chromosome 5q13. Brit. J. Haemat. 97: 523-529, 1997.
[6269] 372. Schmidt, V. A.; Vitale, E.; Bahou, W. F.: Genomic cloning and characterization of the human thrombin receptor gene: structural similarity to the proteinase activated receptor-2 gene. J. Biol. Chem. 271:9307-9312, 1996.
[6270] 373. Vu, T.-K. H.; Hung, D. T.; Wheaton, V. I.; Coughlin, S. R.: Molecular cloning of a functional thrombin receptor reveals a novel proteolytic mechanism of receptor activation. Cell 64: 1057-1068, 1991.
[6271] 374. Bravo, R.: Synthesis of the nuclear protein cyclin (PCNA) and its relationship with DNA replication. Exp. Cell Res. 163: 287-293, 1986.
[6272] 375. Hasan, S.; Hassa, P. O.; Imhof, R.; Hottiger, M. O.: Transcription coactivator p300 binds PCNA and may have a role in DNA repair synthesis. Nature 410:387-391, 2001.
[6273] 376. Hoege, C.; Pfander, B.; Moldovan, G.-L.; Pyrowolakis, G.; Jentsch, S.: RAD6-dependent DNA repair is linked to modification of PCNA by ubiquitin and SUMO. Nature 419: 135-141, 2002.
[6274] 377. Ku, D.-H.; Travali, S.; Calabretta, B.; Huebner, K.; Baserga, R.: Human gene for proliferating cell nuclear antigen has pseudo genes and localizes to chromosome 20. Somat. Cell Molec. Genet. 15: 297-307, 1989.
[6275] 378. Mann, M. J.; Gibbons, G. H.; Kernoff, R. S.; Diet, F. P.; Tsao, P. S.; Cooke, J. P.; Kaneda, Y.; Dzau, V. J.: Genetic engineering of vein grafts resistant to atherosclerosis. Proc. Nat. Acad. Sci. 92:4502-4506, 1995.
[6276] 379. Rao, V. V. N. G.; Schnittger, S.; Hansmann, I.: Chromosomal localization of the human proliferating cell nuclear antigen (PCNA) gene to or close to 20p12 by in situ hybridization. Cytogenet. Cell Genet. 56:169-170, 1991.
[6277] 380. Suzuka, I.; Daidoji, H.; Matsuoka, M.; Kadowaki, K.; Takasaki, Y.; Nakane, P. K.; Moriuchi, T.: Gene for proliferating-cell nuclear antigen (DNA polymerase delta auxiliary protein) is present in both mammalian and higher plant genomes. Proc. Nat. Acad. Sci. 86: 3189-3193, 1989.
[6278] 381. Taniguchi, Y.; Katsumata, Y.; Koido, S.; Suemizu, H.; Yoshimura, S.; Moriuchi, T.; Okumura, K.; Kagotani, K.; Taguchi, H.; Imanishi, T.; Gojobori, T.; Inoko, H.: Cloning, sequencing, and chromosomal localization of two tandemly arranged human pseudo genes for the proliferating cell nuclear antigen (PCNA). Mammalian Genome 7: 906-908, 1996.
[6279] 382. Travali, S.; Ku, D.-H.; Rizzo, M. G.; Ottavio, L.; Baserga, R.; Calabretta, B.: Structure of the human gene for the proliferating cell nuclear antigen. J. Biol. Chem. 264: 7466-7472, 1989.
[6280] 383. Webb, G.; Parsons, P.; Chenevix-Trench, G.: Localization of the gene for human proliferating nuclear antigen/cyclin by in situ hybridization. Hum. Genet. 86: 84-86, 1990.
[6281] 384. Fonatsch, C.; Duchrow, M.; Rieder, H.; Schluter, C.; Gerdes, J.: Assignment of the human Ki-67 gene (MKI67) to 10q25-qter. Genomics 11:476-477, 1991.
[6282] 385. Schluter, C.; Duchrow, M.; Wohlenberg, C.; Becker, M. H. G; Key, G.; Flad, H.-D.; Gerdes, J.: The cell proliferation-associated antigen of antibody Ki-67: a very large, ubiquitous nuclear protein with numerous repeated elements, representing a new kind of cell cycle-maintaining proteins. J. Cell. Biol. 123: 513-522, 1993.
[6283] 386. Schonk, D. M.; Kuijpers, H. J. H.; van Drunen, E.; van-Dalen, C. H.; Geurts van Kessel, A. H. M.; Verheijen, R.; Ramaekers, F. C. S.: Assignment of the gene(s) involved in the expression of the proliferation-related Ki-67 antigen to human chromosome 10. Hum. Genet. 83: 297-299, 1989.
[6284] 387. Traut, W.; Scholzen, T.; Winking, H.; Kubbutat, M. H. G.; Gerdes, J.: Assignment of the murine Ki-67 gene (Mki67) to chromosome band 7F3-F5 by in situ hybridization. Cytogenet. Cell Genet. 83: 12-13, 1998.
[6285] 388. Fukata, M.; Watanabe, T.; Noritake, J.; Nakagawa, M.; Yamaga, M.; Kuroda, S.; Matsuura, Y.; Iwamatsu, A.; Perez, F.; Kaibuchi, K.: Rac1 and Cdc42 capture microtubules through IQGAP1 and CLIP-170. Cell 109:873-885, 2002.
[6286] 389. Brown, M. A.; Nicolai, H.; Xu, C.-F.; Griffiths, B. L.; Jones, K. A.; Solomon, E.; Hosking, L.; Trowsdale, J.; Black, D. M.; McFarlane, R.: Regulation of BRCA1. (Letter) Nature 372: 733 only, 1994.
[6287] 390. Brown, M. A.; Xu, C.-F.; Nicolai, H.; Griffiths, B.; Chambers, J. A.; Black, D.; Solomon, E.: The 5-prime end of the BRCA1 gene lies within a duplicated region of human chromosome 17q21. Oncogene 12:2507-2513, 1996.
[6288] 391. Campbell, I. G.; Nicolai, H. M.; Foulkes, W. D.; Senger, G.; Stamp, G. W.; Allan, G.; Boyer, C.; Jones, K.; Bast, R. C., Jr.; Solomon, E.; Trowsdale, J.; Black, D. M.: A novel gene encoding a B-box protein within the BRCA1 region at 17q21.1. Hum. Molec. Genet. 3: 589-594, 1994.
[6289] 392. Kawashima, K.; Shikama, H.; Imoto, K.; Izawa, M.; Naruke, T.; Okabayashi, K.; Nishimura, S.: Close correlation between restriction fragment length polymorphism of the L-MYC gene and metastasis of human lung cancer to the lymph nodes and other organs. Proc. Nat. Acad. Sci. 85:2353-2356, 1988.
[6290] 393. Kaye, F.; Battey, J.; Nau, M.; Brooks, B.; Seifter, E.; De Greve, J.; Birrer, M.; Sausville, E.; Minna, J.: Structure and expression of the human L-myc gene reveal a complex pattern of alternative mRNA processing. Molec. Cell. Biol. 8: 186-195, 1988.
[6291] 394. McBride, O. W.; Kirsch, I.; Hollis, G.; Nau, M.; Battey, J.; Minna, J.: Human L-myc (MYCL) proto-oncogene is on chromosome 1p32. (Abstract) Cytogenet. Cell Genet. 40: 694 only, 1985.
[6292] 395. Nau, M. M.; Brooks, B. J.; Battey, J.; Sausville, E.; Gazdar, A. F.; Kirsch, I. R.; McBride, O. W.; Bertness, V.; Hollis, G. F.; Minna, J. D.: L-myc, a new myc-related gene amplified and expressed in human small cell lung cancer. Nature 318: 69-73, 1985.
[6293] 396. Rouleau, G. A.; Bazanowski, A.; Gusella, J. F.; Haines, J. L.: A genetic map of chromosome 1: comparison of different data sets and linkage programs. Genomics 7: 313-318, 1990.
[6294] 397. Speleman, F.; Van Camp, G.; Van Roy, N.: Reassignment of MYCL1 to human chromosome 1p34.3 by fluorescence in situ hybridization. Cytogenet. Cell Genet. 72: 189-190, 1996.
[6295] 398. Van Roy, N.; Cheng, N. C.; Laureys, G.; Opdenakker, G.; Versteeg, R.; Speleman, F.: Molecular cytogenetic analysis of 1;17 translocations in neuroblastoma. Europ. J. Cancer 31A: 530-535, 1995.
[6296] 399. Akiyama, T.; Sudo, C.; Ogawara, H.; Toyoshima, K.; Yamamoto, T.: The product of the human c-erbB-2 gene: a 185-kilodalton glycoprotein with tyrosine kinase activity. Science 232: 1644-1646, 1986.
[6297] 400. Ameyaw, M.-M.; Tayeb, M.; Thornton, N.; Folayan, G.; Tariq, M.; Mobarek, A.; Evans, D. A. P.; Ofori-Adjei, D.; McLeod, H. L.: Ethnic variation in the HER-2 codon 655 genetic polymorphism previously associated with breast cancer. J. Hum. Genet. 47: 172-175, 2002.
[6298] 401. Chen, S.-H.; Anderson, J. E.; Giblett, E. R.: Human red cell 2,3-diphosphoglyceratemutase and monophosphoglycerate mutase: genetic evidence for two separate loci. Am. J. Hum. Genet. 29: 405-407, 1977.
[6299] 402. Pol, S.; Bousquet-Lemercier, B.; Pave-Preux, M.; Pawlak, A.; Nalpas, B.; Berthelot, P.; Hanoune, J.; Barouki, R.: Nucleotide sequence and tissue distribution of the human mitochondrial aspartate aminotransferase mRNA. Biochem. Biophys. Res. Commun. 157: 1309-1315, 1988.
[6300] 403. Becker, D. M.; Fikes, J. D.; Guarente, L.: A cDNA encoding a human CCAAT-binding protein cloned by functional complementation in yeast. Proc. Nat. Acad. Sci. 88: 1968-1972, 1991.
[6301] 404. Parmentier, M.; Passage, E.; Vassart, G.; Mattei, M.-G.: The human calbindin D28k (CALB1) and calretinin (CALB2) genes are located at 8q21.3-q22.1 and 16q22-q23, respectively, suggesting a common duplication with the carbonic anhydrase isozyme loci. Cytogenet. Cell Genet. 57:41-43, 1991.
[6302] 405. Parmentier, M.; Szpirer, J.; Levan, G.; Vassart, G.: The human genes for calbindin 27 and 29 kDa proteins are located on chromosomes 8 and 16, respectively. Cytogenet. Cell Genet. 52: 85-87, 1989.
[6303] 406. Schiffmann, S. N.; Cheron, G.; Lohof, A.; d'Alcantara, P.; Meyer, M.; Parmentier, M.; Schurmans, S.: Impaired motor coordination and Purkinje cell excitability in mice lacking calretinin. Proc. Nat. Acad. Sci. 96: 5257-5262, 1999.
[6304] 407. Bibel, M.; Barde, Y.-A.: Neurotrophins: key regulators of cell fate and cell shape in the vertebrate nervous system. Genes Dev. 14:2919-2937, 2000.
[6305] 408. Bothwell, M.: p75(NTR): a receptor after all. Science 272: 506-507, 1996.
[6306] 409. Carter, B. D.; Lewin, G. R.: Neurotrophins live or let die: does p75(NTR) decide? Neuron 18: 187-190, 1997.
[6307] 410. Jackson, R. S.; Creemers, J. W. M.; Ohagi, S.; Raffin-Sanson, M.-L.; Sanders, L.; Montague, C. T.; Hutton, J. C.; O'Rahilly, S.: Obesity and impaired prohormone processing associated with mutations in the human prohormone convertase 1 gene. Nature Genet. 16: 303-306, 1997.
[6308] 411. Naggert, J. K.; Fricker, L. D.; Varlamov, O.; Nishina, P. M.; Rouille, Y.; Steiner, D. F.; Carroll, R. J.; Paigen, B. J.; Leiter, E. H.: Hyperproinsulinaemia in obese fat/fat mice associated with a carboxypeptidase E mutation which reduces enzyme activity. Nature Genet. 10: 135-142, 1995.
[6309] 412. O'Rahilly, S.; Gray, H.; Humphreys, P. J.; Krook, A.; Polonsky, K. S.; White, A.; Gibson, S.; Taylor, K.; Carr, C.: Brief report: impaired processing of prohormones associated with abnormalities of glucose homeostasis and adrenal function. New Eng. J. Med. 333:1386-1390, 1995.
[6310] 413. Ohagi, S.; Sakaguchi, H.; Sanke, T.; Tatsuta, H.; Hanabusa, T.; Nanjo, K.: Human prohormone convertase 3 gene: exon-intron organization and molecular scanning for mutations in Japanese subjects with NIDDM. Diabetes 45:897-901, 1996.
[6311] 414. Furuta, M.; Carroll, R.; Martin, S.; Swift, H.; Ravazzola, M.; Orci, L.; Steiner, D.: Incomplete processing of proinsulin to insulin accompanied by elevation of Des-31,32 proinsulin intermediates in islets of mice lacking active PC2. J. Biol. Chem. 273: 3431-3437, 1998.
[6312] 415. Furuta, M.; Yano, H.; Zhou, A.; Rouille, Y.; Holst, J.; Caroll, R.; Ravazzola, M.; Orci, L.; Furuta, H.; Steiner, D.: Defective prohormone processing and altered pancreatic islet morphology in mice lacking active SPC2. Proc. Nat. Acad. Sci. 94: 6646-6651, 1997.
[6313] 416. Furuta, M.; Zhou, A.; Webb, G.; Carroll, R.; Ravazzola, M.; Orci, L.; Steiner, D. F.: Severe defect in proglucagon processing in isletA-cells of prohormone convertase 2 null mice. J. Biol. Chem. 276:27197-27202, 2001.
[6314] 417. Gabreels, B. A. T. F.; Swaab, D. F.; de Kleijn, D. P. V.; Seidah, N. G.; Van de Loo, J.-W.; Van de Ven, W. J. M.; Martens, G. J. M. and van Leeuwen, F. W.: Attenuation of the polypeptide 7B2, prohormone convertase PC2, and vasopressin in the hypothalamus of some Prader-Willi-patients: indications for a processing defect. J. Clin. Endocr. Metab. 83:591-599, 1998.
[6315] 418. Maglott, D. R.; Feldblyum, T. V.; Durkin, A. S.; Nierman, W. C.: Radiation hybrid mapping of SNAP, PCSK2, and THBD (human chromosome 20p). Mammalian Genome 7: 400-401, 1996.
[6316] 419. Ohagi, S.; LaMendola, J.; LeBeau, M. M.; Espinosa, R., III; Takeda, J.; Smeekens, S. P.; Chan, S. J.; Steiner, D. F.: Identification and analysis of the gene encoding human PC2, a prohormone convertase expressed in neuroendocrine tissues. Proc. Nat. Acad. Sci. 89: 4977-4981, 1992.
[6317] 420. Taylor, N. A.; Shennan, K. I. J.; Cutler, D. F.; Docherty, K.: Mutations within the propeptide, the primary cleavage site or the catalytic site, or deletion of C-terminal sequences, prevents secretion of proPC2 from transfected COS-7 cells. Biochem. J. 321: 367-373, 1997.
[6318] 421. Arbiser, J. L.; Morton, C. C.; Bruns, G. A. P.; Majzoub, J. A.: Human corticotropin releasing hormone gene is located on the long arm of chromosome 8. Cytogenet. Cell Genet. 47: 113-116, 1988.
[6319] 422. Behan, D. P.; Heinrichs, S. C.; Troncoso, J. C.; Liu, X.-J.; Kawas, C. H.; Ling, N.; De Souza, E. B.: Displacement of corticotropin releasing factor from its binding protein as a possible treatment for Alzheimer's disease. Nature 378: 284-287, 1995.
[6320] 423. Cheng, Y.-H.; Nicholson, R. C.; King, B.; Chan, E.-C.; Fitter, J. T.; Smith, R.: Corticotropin-releasing hormone gene expression in primary placental cells is modulated by cyclic adenosine 3-prime, 5-prime-monophosphate. J. Clin. Endocr. Metab. 85: 1239-1244, 2000.
[6321] 424. Habib, K. E.; Weld, K. P.; Rice, K. C.; Pushkas, J.; Champoux, M.; Listwak, S.; Webster, E. L.; Atkinson, A. J.; Schulkin, J.; Contoreggi, C.; Chrousos, G. P.; McCann, S. M.; Suomi, S. J.; Higley, J. D.; Gold, P. W.: Oral administration of a corticotropin-releasing hormone receptor antagonist significantly attenuates behavioral, neuroendocrine, and autonomic responses to stress in primates. Proc. Nat. Acad. Sci. 97:6079-6084, 2000.
[6322] 425. Inder, W. J.; Prickett, T. C. R.; Ellis, M. J.; Hull, L.; Reid, R.; Benny, P. S.; Livesey, J. H.; Donald, R. A.: The utility of plasma CRH as a predictor of preterm delivery. J. Clin. Endocr. Metab. 86:5706-5710, 2001.
[6323] 426. Kellogg, J.; Luty, J. A.; Thompson, R.; Luo, X. Y.; Magenis, R. E.; Litt, M.: Corticotropin releasing hormone (CRH) maps to human chromosome 8 and identifies a TaqI RFLP. Cytogenet. Cell Genet. 51:1022, 1989.
[6324] 427. Knapp, L. T.; Keegan, C. E.; Seasholtz, A. F.; Camper, S. A.: Corticotropin-releasing hormone (Crh) maps to mouse chromosome 3. Mammalian Genome 4: 615-617, 1993.
[6325] 428. Kyllo, J. H.; Collins, M. M.; Vetter, K. L.; Cuttler, L.; Rosenfield, R. L.; Donohoue, P. A.: Linkage of congenital isolated adrenocorticotropichormone deficiency to the corticotropin releasing hormone locus using simple sequence repeat polymorphisms. Am. J. Med. Genet. 62: 262-267, 1996.
[6326] 429. Majzoub, J. A.: Personal Communication. Boston, Mass. Mar. 3, 1995.
[6327] 430. Mandel, H.; Berant, M.; Gotfried, E.; Hochberg, Z.: Autosomal recessive hypothalamic corticotropin deficiency: a new entity and its metabolic consequences. (Abstract) Am. J. Hum. Genet. 47 (suppl.):A66, 1990.
[6328] 431. McLean, M.; Bisits, A.; Davies, J.; Woods, R.; Lowry, P.; Smith, R.: A placental clock controlling the length of human pregnancy. Nature Med. 1: 460-463, 1995.
[6329] 432. Muglia, L.; Jacobson, L.; Dikkes, P.; Majzoub, J. A.: Corticotropin-releasing hormone deficiency reveals major fetal but not adult glucocorticoid need. Nature 373: 427-432, 1995.
[6330] 433. Robinson, B. G.; Emanuel, R. L.; Frim, D. M.; Majzoub, J. A.: Glucocorticoid stimulates expression of corticotropin-releasing hormone gene in human placenta. Proc. Nat. Acad. Sci. 85: 5244-5248, 1988.
[6331] 434. Scatena, C. D.; Adler, S.: Trans-acting factors dictate the species-specific placental expression of corticotropin-releasing factor genes in choriocarcinoma cell lines. Endocrinology 137: 3000-3008, 1996.
[6332] 435. Scatena, C. D.; Adler, S.: Characterization of a human-specific regulator of placental corticotropin-releasing hormone. Molec. Endocr. 12:1228-1240, 1998.
[6333] 436. Shibahara, S.; Morimoto, Y.; Furutani, Y.; Notake, M.; Takahashi, H.; Shimizu, S.; Horikawa, S.; Numa, S.: Isolation and sequence analysis of the human corticotropin-releasing factor precursor gene. EMBO J. 2: 775-779, 1983.
[6334] 437. Stratakis, C. A.; Chrousos, G. P.: Neuroendocrinology and pathophysiology of the stress system. Ann. N. Y. Acad. Sci. 771: 1-18, 1995.
[6335] 438. Stratakis, C. A.; Sarlis, N. J.; Berrettini, W. H.; Badner, J. A.; Chrousos, G. P.; Gershon, E. S.; Detera-Wadleigh, S. D.: Lack of linkage between the corticotropin-releasing hormone (CRH) gene and bipolar affective disorder. Molec. Psychiat. 2: 483-485, 1997.
[6336] 439. Xu, B.; Sano, T.; Yamada, S.; Li, C. C.; Hirokawa, M.: Expression of corticotropin-releasing hormone messenger ribonucleic acid in human pituitary corticotroph adenomas associated with proliferative potential. J. Clin. Endocr. Metab. 85: 1220-1225, 2000.
[6337] 440. Zouboulis, C. C.; Seltmann, H.; Hiroi, N.; Chen, W.; Young, M.; Oeff, M.; Scherbaum, W. A.; Orfanos, C. E.; McCann, S. M.; Bornstein, S. R.: Corticotropin-releasing hormone: an autocrine hormone that promotes lipogenesis in human sebocytes. Proc. Nat. Acad. Sci. 99:7148-7153, 2002.
[6338] 441. Chen, R.; Lewis, K. A.; Perrin, M. H.; Vale, W. W.: Expression cloning of a human corticotropin-releasing-factor receptor. Proc. Nat. Acad. Sci. 90: 8967-8971, 1993.
[6339] 442. Dieterich, K. D.; Gundelfinger, E. D.; Ludecke, D. K.; Lehnert, H.: Mutation and expression analysis of corticotropin-releasing factor 1 receptor in adrenocorticotropin-secreting pituitary adenomas. J. Clin. Endocr. Metab. 83: 3327-3331, 1998.
[6340] 443. Grammatopoulos, D.; Dai, Y.; Chen, J.; Karteris, E.; Papadopoulou, N.; Easton, A. J.; Hillhouse, E. W.: Human corticotropin-releasing hormone receptor: differences in subtype expression between pregnant and nonpregnant myometria. J. Clin. Endocr. Metab. 83: 2539-2544, 1998.
[6341] 444. Leproult, R.; Colecchia, E. F.; L'Hermite-Baleriaux, M.; Van Cauter, E.: Transition from dim to bright light in the morning induces an immediate elevation of cortisol levels. J. Clin. Endocr. Metab. 86:151-157, 2001.
[6342] 445. Liaw, C. W.; Grigoriadis, D. E.; Lovenberg, T. W.; De Souza, E. B.; Maki, R. A.: Localization of ligand-binding domains of human corticotropin-releasing factor receptor: a chimeric receptor approach. Molec. Endocr. 11: 980-985, 1997.
[6343] 446. Danielson, K. G.; Fazzio, A.; Cohen, I.; Cannizzaro, L. A.; Eichstetter, I.; Iozzo, R. V.: The human decorin gene: intron-exon organization, discovery of two alternatively spliced exons in the 5-prime untranslated region, and mapping of the gene to chromosome 12q23. Genomics 15:146-160, 1993.
[6344] 447. Dyne, K. M.; Valli, M.; Forlino, A.; Mottes, M.; Kresse, H.; Cetta, G.: Deficient expression of the small proteoglycan decorin in a case of severe/lethal osteogenesis imperfecta. Am. J. Med. Genet. 63:161-166, 1996.
[6345] 448. Ion, A.; Crosby, A. H.; Kremer, H.; Kenmochi, N.; Van Reen, M.; Fenske, C.; Van Der Burgt, I.; Brunner, H. G.; Montgomery, K.: Detailed mapping, mutation analysis, and intragenic polymorphism identification in candidate Noonan syndrome genes MYL2, DCN, EPS8, and RPL6. J. Med. Genet. 37: 884-886, 2000.
[6346] 449. McBride, O. W.; Fisher, L. W.; Young, M. F.: Localization of PGI (biglycan, BGN) and PGII (decorin, DCN, PG-40) genes on human chromosomes Xq13-qter and 12q, respectively. Genomics 6: 219-255, 1990.
[6347] 450. Moscatello, D. K.; Santra, M.; Mann, D. M.; McQuillan, D. J.; Wong, A. J.; Iozzo, R. V.: Decorin suppresses tumor cell growth by activating the epidermal growth factor receptor. J. Clin. Invest. 101: 406-412, 1998.
[6348] 451. Pulkkinen, L.; Alitalo, T.; Krusius, T.; Peltonen, L.: Expression of decorin in human tissues and cell lines and defined chromosomal assignment of the gene locus (DCN). Cytogenet. Cell Genet. 60: 107-111, 1992.
[6349] 452. Pulkkinen, L.; Kainulainen, K.; Krusius, T.; Makinen, P.; Schollin, J.; Gustavsson, K.-H.; Peltonen, L.: Deficient expression of the gene coding for decorin in a lethal form of Marfan syndrome. J. Biol. Chem. 265: 17780-17785, 1990.
[6350] 453. Schollin, J.; Bjarke, B.; Gustavson, K.-H.: Probable homozygotic form of the Marfan syndrome in a newborn child. Acta Paediat. Scand. 77:452-456, 1988.
[6351] 454. Scholzen, T.; Solursh, M.; Suzuki, S.; Reiter, R.; Morgan, J. L.; Buchberg, A. M.; Siracusa, L. D.; Iozzo, R. V.: The murine decorin: complete cDNA cloning, genomic organization, chromosomal assignment, and expression during organogenesis and tissue differentiation. J. Biol. Chem. 269: 28270-28281, 1994.
[6352] 455. Vogel, K. G.; Clark, P. E.: Small proteoglycan synthesis by skin fibroblasts cultured from elderly donors and patients with defined defects in types I and III collagen metabolism. Europ. J. Cell Biol. 49:236-243, 1989.
[6353] 456. Yoon, J.-W.; Yoon, C.-S.; Lim, H.-W.; Huang, Q. Q.; Kang, Y.; Pyun, K. H.; Hirasawa, K.; Sherwin, R. S.; Jun, H.-S.: Control of autoimmune diabetes in NOD mice by GAD expression or suppression in beta cells. Science 284: 1183-1187, 1999.
[6354] 457. Asakura, H.; Zwain, I. H.; Yen, S. S. C.: Expression of genes encoding corticotropin-releasing factor (CRF), type 1 CRF receptor, and CRF-binding protein and localization of the gene products in the human ovary. J. Clin. Endocr. Metab. 82: 2720-2725, 1997.
[6355] 458. Byerley, W.; Hoff, M.; Holik, J.; Caron, M. G.; Giros, B.: VNTR polymorphism for the human dopamine transporter gene (DAT1). Hum. Molec. Genet. 2: 335, 1993.
[6356] 459. Cook, E. H., Jr.; Stein, M. A.; Krasowski, M. D.; Cox, N. J.; Olkon, D. M.; Kieffer, J. E.; Leventhal, B. L.: Association of attention-deficit disorder and the dopamine transporter gene. Am. J. Hum. Genet. 56:993-998, 1995.
[6357] 460. Doucette-Stamm, L.; Blakely, D. J.; Tian, J.; Mockus, S.; Mao, J.: Population genetic study of the human dopamine transporter gene (DAT1). Genet. Epidemiol. 12: 303-308, 1995.
[6358] 461. Gainetdinov, R. R.; Wetsel, W. C.; Jones, S. R.; Levin, E. D.; Jaber, M.; Caron, M. G.: Role of serotonin in the paradoxical calming effect of psychostimulants on hyperactivity. Science 283: 397-401, 1999.
[6359] 462. Gelernter, J.; Vandenbergh, D.; Kruger, S. D.; Pauls, D. L.; Kurlan, R.; Pakstis, A. J.; Kidd, K. K.; Uhl, G.: The dopamine transporter protein gene (SLC6A3): primary linkage mapping and linkage studies in Tourette syndrome. Genomics 30: 459-463, 1995.
[6360] 463. Gill, M.; Daly, G.; Heron, S.; Hawi, Z.; Fitgerald, M.: Confirmation of association between attention deficit hyperactivity disorder and a dopamine transporter polymorphism. Molec. Psychiat. 2: 311-313, 1997.
[6361] 464. Giros, B.; El Mestikawy, S.; Godinot, N.; Zheng, K.; Han, H.; Yang-Feng, T.; Caron, M. G.: Cloning, pharmacological characterization, and chromosome assignment of the human dopamine transporter. Molec. Pharm. 42:383-390, 1992.
[6362] 465. Giros, B.; Jaber, M.; Jones, S. R.; Wightman, R. M.; Caron, M. G.: Hyperlocomotion and indifference to cocaine and amphetamine in mice lacking the dopamine receptor. Nature 370: 606-612, 1996.
[6363] 466. Goldman, D.: Dopamine transporter, alcoholism and other diseases. Nature Med. 1: 624-625, 1995.
[6364] 467. Andrechek, E. R.; Hardy, W. R.; Girgis-Gabardo, A. A.; Perry, R. L. S.; Butler, R.; Graham, F. L.; Kahn, R. C.; Rudnicki, M. A.; Muller, W. J.: ErbB2 is required for muscle spindle and myoblast cell survival. Molec. Cell. Biol. 22: 4714-4722, 2002.
[6365] 468. Bargmann, C. I.; Hung, M.-C.; Weinberg, R. A.: The NEU oncogene encodes an epidermal growth factor receptor-related protein. Nature 319:226-230, 1986.
[6366] 469. Chan, R.; Hardy, W. R.; Laing, M. A.; Hardy, S. E.; Muller, W. J.: The catalytic activity of the ErbB-2 receptor tyrosine kinase is essential for embryonic development. Molec. Cell. Biol. 22: 1073-1078, 2002.
[6367] 470. Coussens, L.; Yang-Feng, T. L.; Liao, Y.-C.; Chen, E.; Gray, A.; McGrath, J.; Seeburg, P. H.; Libermann, T. A.; Schlessinger, J.; Francke, U.; Levinson, A.; Ullrich, A.: Tyrosine kinase receptor with extensive homology to EGF receptor shares chromosomal location with NEU oncogene. Science 230:1132-1139, 1985.
[6368] 471. Crone, S. A.; Zhao, Y.-Y.; Fan, L.; Gu, Y.; Minamisawa, S.; Liu, Y.; Peterson, K. L.; Chen, J.; Kahn, R.; Condorelli, G.; Ross, J., Jr.; Chien, K. R.; Lee, K.-F.: ErbB2 is essential in the prevention of dilated cardiomyopathy. Nature Med. 8: 459-465, 2002.
[6369] 472. Dankort, D.; Maslikowski, B.; Warner, N.; Kanno, N.; Kim, H.; Wang, Z.; Moran, M. F.; Oshima, R. G.; Cardiff, R. D.; Muller, W. J.: Grb2 and Shc adapter proteins play distinct roles in Neu (ErbB-2) induced mammary tumorigenesis: implications for human breast cancer. Molec. Cell. Biol. 21: 1540-1551, 2001.
[6370] 473. De Boer, J. G.: A new mutator phenotype in breast cancer? (Commentary) Proc. Nat. Acad. Sci. 99: 3368-3369, 2002.
[6371] 474. De Placido, S.; Carlomagno, C.; De Laurentiis, M.; Bianco, A. R.: C-erbB2 expression predicts tamoxifen efficacy in breast cancer patients. Breast Cancer Res. Treat. 52: 55-64, 1998.
[6372] 475. Di Fiore, P. P.; Pierce, J. H.; Kraus, M. H.; Segatto, O.; King, C. R.; Aaronson, S. A.: erbB-2 is a potent oncogene when overexpressed in NIH/3T3 cells. Science 237: 178-182, 1987.
[6373] 476. Doherty, J. K.; Bond, C.; Jardim, A.; Adelman, J. P.; Clinton, G. M.: The HER-2/neu receptor tyrosine kinase gene encodes a secreted auto inhibitor. Proc. Nat. Acad. Sci. 96: 10869-10874, 1999.
[6374] 477. Ehsani, A.; Low, J.; Wallace, R. B.; Wu, A. M.: Characterization of a new allele of the human ERBB2 gene by allele-specific competition hybridization. Genomics 15: 426-429, 1993.
[6375] 478. Francke, U.: Personal Communication. New Haven, Conn. 4/1988.
[6376] 479. Fukushige, S.-I.; Matsubara, K.-I.; Yoshida, M.; Sasaki, M.; Suzuki, T.; Semba, K.; Toyoshima, K.; Yamamoto, T.: Localization of a novel v-erbB-related gene, c-erbB-2, on human chromosome 17 and its amplification in a gastric cancer cell line. Molec. Cell. Biol. 6: 955-958, 1986.
[6377] 480. Kaneko, Y.; Homma, C.; Maseki, N.; Sakurai, M.; Toyoshima, K.; Yamamoto, T.: Human c-erbB-2 remains on chromosome 17 in band q21 in the 15;17 translocation associated with acute promyelocytic leukemia. Jpn. J. Cancer Res. 78: 16-19, 1987.
[6378] 481. Lin, W.; Sanchez, H. B.; Deerinck, T.; Morris, J. K.; Ellisman, M.; Lee, K. F.: Aberrant development of motor axons and neuromuscular synapses in erbB2-deficient mice. Proc. Nat. Acad. Sci. 97: 1299-1304, 2000.
[6379] 482. Liu, S.; Liu, W.; Jakubczak, J. L.; Erexson, G. L.; Tindall, K. R.; Chan, R.; Muller, W. J.; Adhya, S.; Garges, S.; Merlino, G.: Genetic instability favoring transversions associated with ErbB2-induced mammary tumorigenesis. Proc. Nat. Acad. Sci. 99: 3770-3775, 2002.
[6380] 483. Mehta, R. R.; McDermott, J. H.; Hieken, T. J.; Marler, K. C.; Patel, M. K.; Wild, L. D.; Das Gupta, T. K.: Plasma c-erbB2 levels in breast cancer patients: prognostic significance in predicting response to chemotherapy. J. Clin. Oncol. 16: 2409-2416, 1998.
[6381] 484. Morris, J. K.; Lin, W.; Hauser, C.; Marchuk, Y.; Getman, D.; Lee, K.-F.: Rescue of the cardiac defect in ErbB2 mutant mice reveals essential roles of ErbB2 in peripheral nervous system development. Neuron 23:273-283, 1999.
[6382] 485. Muleris, M.; Almeida, A.; Malfoy, B.; Dutrillaux, B.: Assignment of v-erb-b2 avian erythroblastic leukemia viral oncogene homolog 2(ERBB2) to human chromosome band 17q21.1 by in situ hybridization. Cytogenet. Cell Genet. 76: 34-35, 1997.
[6383] 486. Ozcelik, C.; Erdmann, B.; Pilz, B.; Wettschureck, N.; Britsch, S.; Hubner, N.; Chien, K. R.; Birchmeier, C.; Garratt, A. N.: Conditional mutation of the ErbB2 (HER2) receptor in cardiomyocytes leads to dilated cardiomyopathy. Proc. Nat. Acad. Sci. 99: 8880-8885, 2002.
[6384] 487. Papewalis, J.; Nikitin, A. Y.; Rajewsky, M. F.: G to A polymorphismat amino acid codon 655 of the human erbB-2/HER2 gene. Nucleic Acids Res. 19: 5452 only, 1991.
[6385] 488. Pegram, M. D.; Finn, R. S.; Arzoo, K.; Beryt, M.; Pietras, R. J.; Slamon, D. J.: The effect of HER-2/neu overexpression on chemotherapeutic drug sensitivity in human breast and ovarian cancer cells. Oncogene 15:537-547, 1997.
[6386] 489. Pietras, R. J.; Pegram, M. D.; Finn, R. S.; Maneval, D. A.; Slamon, D. J.: Remission of human breast cancer xenografts on therapy with humanized monoclonal antibody to HER-2 receptor and DNA-reactive drugs. Oncogene 17:2235-2249, 1998.
[6387] 490. Popescu, N. C.; King, C. R.; Kraus, M. H.: Localization of the human erbB-2 gene on normal and rearranged chromosomes 17 to bands q12-21.32. Genomics 4: 362-366, 1989.
[6388] 491. Qiu, Y.; Ravi, L.; Kung, H.-J.: Requirement of ErbB2 for signalling by interleukin-6 in prostate carcinoma cells. Nature 393: 83-85, 1998.
[6389] 492. Semba, K.; Kamata, N.; Toyoshima, K.; Yamamoto, T.: A v-erbB-related protooncogene, c-erbB-2, is distinct from the c-erbB-1/epidermal growth factor-receptor gene and is amplified in a human salivary gland adenocarcinoma. Proc. Nat. Acad. Sci. 82: 6497-6501, 1985.
[6390] 493. Slamon, D. J.; Godolphin, W.; Jones, L. A.; Holt, J. A.; Wong, S. G.; Keith, D. E.; Levin, W. J.; Stuart, S. G.; Udove, J.; Ullrich, A.; Press, M. F.: Studies of the HER-2/neu protooncogene in human breast and ovarian cancer. Science 244: 707-712, 1989.
[6391] 494. Slamon, D. J.; Leyland-Jones, B.; Shak, S.; Fuchs, H.; Paton, V.; Bajamonde, A.; Fleming, T.; Eiermann, W.; Wolter, J.; Pegram, M.; Baselga, J.; Norton, L.: Use of chemotherapy plus a monoclonal antibody against HER2 for metastatic breast cancer that overexpresses HER2. New Eng. J. Med. 344: 783-792, 2001.
[6392] 495. Scita, G.; Nordstrom, J.; Carbone, R.; Tenca, P.; Giardina, G.; Gutkind, S.; Bjarnegard, M.; Betsholtz, C.; Di Fiore, P. P.: EPS8 and E3B1 transduce signals from Ras to Rac. Nature 401: 290-293, 1999.
[6393] 496. Zuniga, A.; Haramis, A.-P. G.; McMahon, A. P.; Zeller, R.: Signal relay by BMP antagonism controls the SHH/FGF4 feedback loop in vertebrate limb buds. Nature 401: 598-602, 1999.
[6394] 497. Heine, P. A.; Taylor, J. A.; Iwamoto, G. A.; Lubahn, D. B.; Cooke, P. S.: Increased adipose tissue in male and female estrogen receptor-alpha knockout mice. Proc. Nat. Acad. Sci. 97: 12729-12734, 2000.
[6395] 498. Cook, P. J. L.; Hamerton, J. L.: Report of the committee on the genetic constitution of chromosome 1. Cytogenet. Cell Genet. 25:9-20, 1979.
[6396] 499. Karasawa, M.; Zwacka, R. M.; Reuter, A.; Fink, T.; Hsieh, C. L.; Lichter, P.; Francke, U.; Weiher, H.: The human homolog of the glomerulosclerosis gene Mpv17: structure and genomic organization. Hum. Molec. Genet. 2:1829-1834, 1993.
[6397] 500. Boyes, J.; Bird, A.: DNA methylation inhibits transcription indirectly via a methyl-CpG binding protein. Cell 64: 1123-1134, 1991.
[6398] 501. Cross, S. H.; Meehan, R. R.; Nan, X.; Bird, A.: A component of the transcriptional repressor MeCP1 shares a motif with DNA methyltransferase and HRX proteins. Nature Genet. 16: 256-259, 1997.
[6399] 502. Hendrich, B.; Abbott, C.; McQueen, H.; Chambers, D.; Cross, S.; Bird, A.: Genomic structure and chromosomal mapping of the murine and human Mbd1, Mbd2, Mbd3, and Mbd4 genes. Mammalian Genome 10:906-912, 1999.
[6400] 503. Beauchemin, N.; Draber, P.; Dveksler, G.; Gold, P.; Gray-Owen, S.; Grunert, F.; Hammarstrom, S.; Holmes, K. V.; Karlsson, A.; Kuroki, M.; Lin, S.-H.; Lucka, L.; and 13 others: Redefined nomenclature for members of the carcinoembryonic antigen family. Exp. Cell Res. 252:243-249, 1999.
[6401] 504. Compton, D. A.; Szilak, I.; Cleveland, D. W.: Primary structure of NuMA, an intranuclear protein that defines a novel pathway for segregation of proteins at mitosis. J. Cell Biol. 116: 1395-1408, 1992.
[6402] 505. Lydersen, B. K.; Pettijohn, D. E.: Human-specific nuclear protein that associates with the polar region of the mitotic apparatus: distribution in a human/hamster hybrid cell. Cell 22: 489-499, 1980.
[6403] 506. Merdes, A.; Ramyar, K.; Vechio, J. D.; Cleveland, D. W.: A complex of NuMA and cytoplasmic dynein is essential for mitotic spindle assembly. Cell 87:447-458, 1996.
[6404] 507. Sparks, C. A.; Bangs, P. L.; McNeil, G. P.; Lawrence, J. B.; Fey, E. G.: Assignment of the nuclear mitotic apparatus protein NuMA gene to human chromosome 11q13. Genomics 17: 222-224, 1993.
[6405] 508. Wells, R. A.; Catzavelos, C.; Kamel-Reid, S.: Fusion of retinoic acid receptor alpha to NuMA, the nuclear mitotic apparatus protein, by a variant translocation in acute promyelocytic leukaemia. Nature Genet. 17: 109-113, 1997.
[6406] 509. Wiese, C.; Wilde, A.; Moore, M. S.; Adam, S. A.; Merdes, A.; Zheng, Y.: Role of importin-beta in coupling Ran to downstream targets in microtubule assembly. Science 291: 653-656, 2001.
[6407] 510. Yang, C. H.; Lambie, E. J.; Snyder, M.: NuMA: an unusually long coiled-coil related protein in the mammalian nucleus. J. Cell Biol. 116:1303-1317, 1992.
[6408] 511. Nomura, N.; Nagase, T.; Miyajima, N.; Sazuka, T.; Tanaka, A.; Sato, S.; Seki, N.; Kawarabayasi, Y.; Ishikawa, K.; Tabata, S.: Prediction of the coding sequences of unidentified human genes. II. The coding sequences of 40 new genes (KIAA0041-KIAA0080) deduced by analysis of cDNA clones from human cell line KG-1. DNA Res. 1: 223-229, 1994.
[6409] 512. Bezieau, S.; Devilder, M.-C.; Avet-Loiseau, H.; Mellerin, M.-P.; Puthier, D.; Pennarun, E.; Rapp, M.-J.; Harousseau, J.-L.; Moisan, J.-P.; Bataille, R.: High incidence of N and K-Ras activating mutations in multiple myeloma and primary plasma cell leukemia at diagnosis. Hum. Mutat. 18: 212-224, 2001.
[6410] 513. Popescu, N. C.; Amsbaugh, S. C.; DiPaolo, J. A.; Tronick, S. R.; Aaronson, S. A.; Swan, D. C.: Chromosomal localization of three human ras genes by in situ molecular hybridization. Somat. Cell Molec. Genet. 11: 149-155, 1985.
[6411] 514. Maggi, M.; Barni, T.; Fantoni, G.; Mancina, R.; Pupilli, C.; Luconi, M.; Crescioli, C.; Serio, M.; Vannelli, G. B.: Expression and biological effects of endothelin-1 in human gonadotropin-releasing hormone-secreting neurons. J. Clin. Endocr. Metab. 85: 1658-1665, 2000.
[6412] 515. Okafor, M. C.; Delamere, N. A.: The inhibitory influence of endothelin on active sodium-potassium transport in porcine lens. Invest. Ophthal. Vis. Sci. 42: 1018-1023, 2001.
[6413] 516. Zeidel, M. L.; Brady, H. R.; Kone, B. C.; Gullans, S. R.; Brenner, B. M.: Endothelin, a peptide inhibitor of Na(+)-K(+)-ATPase in intactrenal tubular epithelial cells. Am. J. Physiol. 257: C1101-C1107, 1989.
[6414] 517. Lerman, C.; Caporaso, N. E.; Audrain, J.; Main, D.; Bowman, E. D.; Lockshin, B.; Boyd, N. R.; Shields, P. G.: Evidence suggesting the role of specific genetic factors in cigarette smoking. Health Psych. 18: 14-20, 1999.
[6415] 518. Lossie, A. C.; Vandenbergh, D. J.; Uhl, G. R.; Camper, S. A.: Localization of the dopamine transporter gene, Datl, on mouse chromosome
[6416] 519. Mammalian Genome 5: 117-118, 1994.13. Sabol, S. Z.; Nelson, M. L.; Fisher, C.; Gunzerath, L.; Brody, C. L.; Hu, S.; Sirota, L. A.; Marcus, S. E.; Greenberg, B. D.; Lucas, F. R., IV; Benjamin, J.; Murphy, D. L.; Hamer, D. H.: A genetic association for cigarette smoking behavior. Health Psych. 18: 7-13, 1999.
[6417] 520. Tiihonen, J.; Kuikka, J.; Bergstrom, K.; Hakola, P.; Karhu, J.; Ryynanen, O.-P.; Fohr, J.: Altered striatal dopamine re-uptake site densities in habitually violent and non-violent alcoholics. Nature Med. 1: 654-657, 1995.
[6418] 521. Vandenbergh, D. J.; Persico, A. M.; Hawkins, A. L.; Griffin, C. A.; Li, X.; Jabs, E. W.; Uhl, G. R.: Human dopamine transporter gene (DAT1) maps to chromosome 5p15.3 and displays a VNTR. Genomics 14:1104-1106, 1992.
[6419] 522. Vandenbergh, D. J.; Persico, A. M.; Uhl, G. R.: A human dopamine transporter cDNA predicts reduced glycosylation, displays a novel repetitive element and provides racially-dimorphic TaqI RFLPs. Molec. Brain Res. 15: 161-166, 1992.
[6420] 523. Waldman, I. D.; Rowe, D. C.; Abramowitz, A.; Kozel, S. T.; Mohr, J. H.; Sherman, S. L.; Cleveland, H. H.; Sanders, M. L.; Gard, J. M. C.; Stever, C.: Association and linkage of the dopamine transporter gene and attention-deficit hyperactivity disorder in children: heterogeneityowing to diagnostic subtype and severity. Am. J. Hum. Genet. 63:1767-1776, 1998.
[6421] 524. von Boehmer, H.; Sarukhan, A.: GAD, a single autoantigen for diabetes. Science 284: 1135-1136, 1999.
[6422] 525. McGill, G. G.; Horstmann, M.; Widlund, H. R.; Du, J.; Motyckova, G.; Nishimura, E. K.; Lin, Y.-L.; Ramaswamy, S.; Avery, W.; Ding, H.-F.; Jordan, S. A.; Jackson, I. J.; Korsmeyer, S. J.; Golub, T. R.; Fisher, D. E.: Bcl2 regulation by the melanocyte master regulator Mitf modulates lineage survival and melanoma cell viability. Cell 109:707-718, 2002.
[6423] 526. Geck, P.; Sonnenschein, C.; Soto, A. M.: The D13S171 marker, misannotated to BRCA2, links the AS3 gene to various cancers. (Letter) Am. J. Hum. Genet. 69: 461-463, 2001.
[6424] 527. Geck, P.; Szelei, J.; Jimenez, J.; Sonnenschein, C.; Soto, A. M.: Early gene expression during androgen-induced inhibition of proliferation of prostate cancer cells: a new suppressor candidate on chromosome 13, in the BRCA2-Rb1 locus. J. Steroid Biochem. Molec. Biol. 68:41-50, 1999.
[6425] 528. Okazaki, I.; Kinoshita, K.; Muramatsu, M.; Yoshikawa, K.; Honjo, T.: The AID enzyme induces class switch recombination in fibroblasts. Nature 416:340-345, 2002.
[6426] 529. Petersen-Mahrt, S. K.; Harris, R. S.; Neuberger, M. S.: AID mutates E. coli suggesting a DNA deamination mechanism for antibody diversification. Nature 418:99-104, 2002.
[6427] 530. Revy, P.; Muto, T.; Levy, Y.; Geissmann, F.; Plebani, A.; Sanal, O.; Catalan, N.; Forveille, M.; Dufourcq-Lagelouse, R.; Gennery, A.; Tezcan, I.; Ersoy, F.; and 9 others: Activation-induced cytidinedeaminase (AID) deficiency causes the autosomal recessive form of the hyper-IgM syndrome (HIGM2). Cell 102: 565-575, 2000.
[6428] 531. Yoshikawa, K.; Okazaki, I.; Eto, T.; Kinoshita, K.; Muramatsu, M.; Nagaoka, H.; Honjo, T.: AID enzyme-induced hypermutation in an actively transcribed gene in fibroblasts. Science 296: 2033-2036, 2002.
[6429] 532. Tamari, M.; Daigo, Y.; Nakamura, Y.: Isolation and characterization of a novel serine threonine kinase gene on chromosome 3q22-21.3. J. Hum. Genet. 44: 116-120, 1999.
[6430] 533. Tamari, M.; Daigo, Y.; Ishikawa, S.; Nakamura, Y.: Genomic structure of a novel human gene (XYLB) on chromosome 3p22-p21.3 encoding a xylulokinase-like protein. Cytogenet. Cell Genet. 82: 101-104, 1998.
[6431] 534. Hertzel, A. V.; Bernlohr, D. A.: Cloning and chromosomal location of the murine keratinocyte lipid-binding protein gene. Gene 221:235-243, 1998.
[6432] 535. Madsen, P.; Rasmussen, H. H.; Leffers, H.; Honore, B.; Celis, J. E.: Molecular cloning and expression of a novel keratinocyte protein (psoriasis-associated fatty acid-binding protein [PA-FABP]) that is highly up-regulated in psoriatic skin and that shares similarity to fatty acid-binding proteins. J. Invest. Derm. 99: 299-305, 1992.
[6433] 536. Siegenthaler, G.; Hotz, R.; Chatellard-Gruaz, D.; Didierjean, L.; Hellman, U.; Saurat, J. H.: Purification and characterization of the human epidermal fatty acid-binding protein: localization during epidermal cell differentiation in vivo and in vitro. Biochem J. 302:363-371, 1994.
[6434] 537. Polyak, K.; Xia, Y.; Zweier, J. L.; Kinzler, K. W.; Vogelstein, B.: A model for p53-induced apoptosis. Nature 389: 300-305, 1997.
[6435] 538. Hernandez, M.-C.; Andres-Barquin, P. J.; Holt, I.; Israel, M. A.: Cloning of human ENC-1 and evaluation of its expression and regulation in nervous system tumors. Exp. Cell Res. 242: 470-477, 1998.
[6436] 539. Hernandez, M.-C.; Andres-Barquin, P. J.; Israel, M. A.: Assignment of the ectodermal-neural cortex 1 gene (Enc1) to mouse chromosome band 13D1 by fluorescence in situ hybridization. Cytogenet. Cell Genet. 89: 158-159, 2000.
[6437] 540. Hernandez, M.-C.; Andres-Barquin, P. J.; Kuo, W. L.; Israel, M. A.: Assignment of the ectodermal-neural cortex 1 gene (ENC1) to human chromosome band 5q13 by in situ hybridization. Cytogenet. Cell Genet. 87:89-90, 1999.
[6438] 541. Kim, T.-A.; Lim, J.; Ota, S.; Raja, S.; Rogers, R.; Rivnay, B.; Avraham, H.; Avraham, S.: NRP/B, a novel nuclear matrix protein, associates with p110(RB) and is involved in neuronal differentiation. J. Cell Biol. 141: 553-566, 1998.
[6439] 542. Christopoulos, G.; Perry, K. J.; Morfis, M.; Tilakaratne, N.; Gao, Y.; Fraser, N. J.; Main, M. J.; Foord, S. M.; Sexton, P. M.: Multiple amylin receptors arise from receptor activity-modifying protein interaction with the calcitonin receptor gene product. Molec. Pharm. 56: 235-242, 1999.
[6440] 543. de Vernejoul, M.-C.: Personal Communication. Paris, France Jan. 19, 1999.
[6441] 544. Gorn, A. H.; Lin, H. Y.; Yamin, M.; Auron, P. E.; Flannery, M. R.; Tapp, D. R.; Manning, C. A.; Lodish, H. F.; Krane, S. M.; Goldring, S. R.: Cloning, characterization, and expression of a human calcitonin receptor from an ovarian carcinoma cell line. J. Clin. Invest. 90:1726-1735, 1992.
[6442] 545. Bundey, S.: Recent views on genetic factors in retinoblastoma. (Abstract) J. Med. Genet. 17: 386-387, 1980.
[6443] 546. Bundey, S.; Morten, J. E. N.: An unusual pedigree with retinoblastoma. Does it shed light on the delayed mutation and host resistance theories? Hum. Genet. 59: 434-436, 1981.
[6444] 547. Cance, W. G.; Brennan, M. F.; Dudas, M. E.; Huang, C.-M.; Cordon-Cardo, C.: Altered expression of the retinoblastoma gene product in human sarcomas. New Eng. J. Med. 323: 1457-1462, 1990.
[6445] 548. Canning, S.; Dryja, T. P.: Short, direct repeats at the breakpoints of deletions of the retinoblastoma gene. Proc. Nat. Acad. Sci. 86:5044-5048, 1989.
[6446] 549. Carlson, E. A.; Desnick, R. J.: Mutational mosaicism and genetic counseling in retinoblastoma. Am. J. Med. Genet. 4: 365-381, 1979.
[6447] 550. Cavenee, W. K.: The genetic basis of neoplasia: the retinoblastoma paradigm. Trends Genet. 2: 299-300, 1986.
[6448] 551. Cavenee, W. K.; Dryja, T. P.; Phillips, R. A.; Benedict, W. F.; Godbout, R.; Gallie, B. L.; Murphree, A. L.; Strong, L. C.; White, R. L.: Expression of recessive alleles by chromosomal mechanisms in retinoblastoma. Nature 305: 779-784, 1983.
[6449] 552. Cavenee, W. K.; Hansen, M. F.; Nordenskjold, M.; Kock, E.; Maumenee, I.; Squire, J. A.; Phillips, R. A.; Gallie, B. L.: Genetic origin of mutations predisposing to retinoblastoma. Science 228: 501-503, 1985.
[6450] 553. Cavenee, W. K.; Murphree, A. L.; Shull, M. M.; Benedict, W. F.; Sparkes, R. S.; Kock, E.; Nordenskjold, M.: Prediction of familial predisposition to retinoblastoma. New Eng. J. Med. 314: 1201-1207, 1986.
[6451] 554. Chano, T.; Ikegawa, S.; Kontani, K.; Okabe, H.; Baldini, N.; Saeki, Y.: Identification of RB1CC1, a novel human gene that can induce RB1 in various human cells. Oncogene 21: 1295-1298, 2002.
[6452] 555. Chauveinc, L.; Mosseri, V.; Quintana, E.; Desjardins, L.; Schlienger, P.; Doz, F.; Dutrillaux, B.: Osteosarcoma following retinoblastoma: age at onset and latency period. Ophthalmic Genet. 22: 77-88, 2001.
[6453] 556. Chen, P.-L.; Scully, P.; Shew, J.-Y.; Wang, J. Y. J.; Lee, W.-H.: Phosphorylation of the retinoblastoma gene product is modulated during the cell cycle and cellular differentiation. Cell 58: 1193-1198, 1989.
[6454] 557. Connolly, M. J.; Payne, R. H.; Johnson, G.; Gallie, B. L.; Allderdice, P. W.; Marshall, W. H.; Lawton, R. D.: Familial, EsD-linked, retinoblastoma with reduced penetrance and variable expressivity. Hum. Genet. 65:122-124, 1983.
[6455] 558. Cowell, J. K.; Bia, B.: A novel missense mutation in patients from a retinoblastoma pedigree showing only mild expression of the tumor phenotype. Oncogene 16: 3211-3213, 1998.
[6456] 559. Cowell, J. K.; Rutland, P.; Hungerford, J.; Jay, M.: Deletion of chromosome region 13q14 is transmissible and does not always predispose to retinoblastoma. Hum. Genet. 80: 43-45, 1988.
[6457] 560. Cowell, J. K.; Rutland, P.; Jay, M.; Hungerford, J.: Deletions of the esterase D locus from a survey of 200 retinoblastoma patients. Hum. Genet. 72: 164-167, 1986.
[6458] 561. Cowell, J. K.; Smith, T.; Bia, B.: Frequent constitutional Cto T mutations in CGA-arginine codons in the RB1 gene produce premature stop codons in patients with bilateral (hereditary) retinoblastoma. Europ. J. Hum. Genet. 2: 281-290, 1994.
[6459] 562. Dahiya, A.; Wong, S.; Gonzalo, S.; Gavin, M.; Dean, D. C.: Linking the Rb and Polycomb pathways. Molec. Cell 8: 557-568, 2001.
[6460] 563. Davison, E. V.; Gibbons, B.; Aherne, G. E. S.; Roberts, D. F.: Chromosomes in retinoblastoma patients. Clin. Genet. 15: 505-508, 1979.
[6461] 564. DeCaprio, J. A.; Ludlow, J. W.; Lynch, D.; Furukawa, Y.; Griffin, J.; Piwnica-Worms, H.; Huang, C.-M.; Livingston, D. M.: The product of the retinoblastoma susceptibility gene has properties of a cell cycle regulatory element. Cell 58: 1085-1095, 1989.
[6462] 565. de Grouchy, J.; Turleau, C.; Cabanis, M. O.; Richardet, J. M.: Retinoblastome et deletion intercalaire du chromosome 13. Arch. Franc. Pediat. 37: 531-535, 1980.
[6463] 566. Dryja, T.; Cavenee, W.; Epstein, J.; Rapaport, J.; Goorin, A.; Koufos, A.: Chromosome 13 homozygosity in osteogenic sarcoma without retinoblastoma. (Abstract) Am. J. Hum. Genet. 36: 28S, 1984.
[6464] 567. Dryja, T. P.; Bruns, G. A. P.; Gallie, B.; Petersen, R.; Green, W.; Rapaport, J. M.; Albert, D. M.; Gerald, P. S.: Low incidence of deletion of the esterase D locus in retinoblastoma patients. Hum. Genet. 64: 151-155, 1983.
[6465] 568. Dryja, T. P.; Cavenee, W.; White, R.; Rapaport, J. M.; Petersen, R.; Albert, D. M.; Bruns, G. A. P.: Homozygosity of chromosome 13 in retinoblastoma. New Eng. J. Med. 310: 550-553, 1984.
[6466] 569. Dryja, T. P.; Friend, S.; Weinberg, R. A.: Isolation of a cDNA fragment derived from human retina mRNA which detects a locus within 13q14 often deleted in retinoblastomas. (Abstract) Am. J. Hum. Genet. 39:A29, 1986.
[6467] 570. Dryja, T. P.; Mukai, S.; Petersen, R.; Rapaport, J. M.; Walton, D.; Yandell, D. W.: Parental origin of mutations of the retinoblastoma gene. Nature 339: 556-558, 1989.
[6468] 571. Dryja, T. P.; Mukai, S.; Rapaport, J. M.; Yandell, D. W.: Parental origin of mutations of the retinoblastoma gene. (Abstract) Am. J. Hum. Genet. 45 (suppl.): A19, 1989.
[6469] 572. Clinton, M.; Frangou-Lazaridis, M.; Panneerselvam, C.; Horecker, B. L.: The sequence of human parathymosin deduced from a cloned human kidney cDNA. Biochem. Biophys. Res. Commun. 158: 855-862, 1989.
[6470] 573. Szabo, P.; Clinton, M.; Macera, M.; Horecker, B. L.: Localization of the gene coding for parathymosin to chromosome 17 in humans. Cytogenet. Cell Genet. 50: 91-92, 1989.
[6471] 574. Carvajal, J. J.; Pook, M. A.; dos Santos, M.; Doudney, K.; Hillermann, R.; Minogue, S.; Williamson, R.; Hsuan, J. J.; Chamberlain, S.: The Friedreich's ataxia gene encodes a novel phosphatidylinositol-4-phosphate5-kinase. Nature Genet. 14: 157-162, 1996.
[6472] 575. Carvajal, J. J.; Pook, M. A.; Doudney, K.; Hillermann, R.; Wilkes, D.; Al-Mahdawi, S.; Williamson, R.; Chamberlain, S.: Friedreich's ataxia: a defect in signal transduction? Hum. Molec. Genet. 4: 1411-1419, 1995.
[6473] 576. Pook, M. A.; Carvajal, J. J; Doudney, K.; Hillermann, R.; Chamberlain, S.: Exon-intron structure of a 2.7-kb transcript of the STM7 gene with phosphatidylinositol-4-phosphate 5-kinase activity. Genomics 42:170-172, 1997.
[6474] 577. Plougastel, B.; Trowsdale, J.: Cloning of NKG2-F, a new member of the NKG2 family of human natural killer cell receptor genes. Europ. J. Immun. 27: 2835-2839, 1997.
[6475] 578. Sutherland, C. L.; Chalupny, N. J.; Schooley, K.; VandenBos, T.; Kubin, M.; Cosman, D.: UL16-binding proteins, novel MHC class I-related proteins, bind to NKG2D and activate multiple signaling pathways in primary NK cells. J. Immun. 168: 671-679, 2002.
[6476] 579. Wu, J.; Song, Y.; Bakker, A. B. H.; Bauer, S.; Spies, T.; Lanier, L. L.; Phillips, J. H.: An activating immunoreceptor complex formed by NKG2D and DAP10. Science 285: 730-732, 1999.
[6477] 580. Volkmer, E.; Karnitz, L. M.: Human homologs of Schizosaccharomyces pombe Rad1, Hus1, and Rad9 form a DNA damage-responsive protein complex. J. Biol. Chem. 274: 567-570, 1999.
[6478] 581. Hacker, B. M.; Tomlinson, J. E.; Wayman, G. A.; Sultana, R.; Chan, G.; Villacres, E.; Disteche, C.; Storm, D. R.: Cloning, chromosomal mapping, and regulatory properties of the human type 9 adenylyl cyclase (ADCY9). Genomics 50: 97-104, 1998.
[6479] 582. Paterson, J. M.; Smith, S. M.; Harmar, A. J.; Antoni, F. A.: Control of a novel adenylyl cyclase by calcineurin. Biochem. Biophys. Res. Commun. 214: 1000-1008, 1995.
[6480] 583. Premont, R. T.; Matsuoka, I.; Mattei, M. G.; Pouille, Y.; Defer, N.; Hanoune, J.: Identification and characterization of a widely expressed form of adenylyl cyclase. J. Biol. Chem. 271: 13900-13907, 1996.
[6481] 584. Toyota, T.; Hattori, E.; Meerabux, J.; Yamada, K.; Saito, K.; Shibuya, H.; Nankai, M.; Yoshikawa, T.: Molecular analysis, mutation screening, and association study of adenylate cyclase type 9 gene (ADCY9) in mood disorders. Am. J. Med. Genet. (Neuropsychiat. Genet.) 114:84-92, 2002.
[6482] 585. Amiel, J.; Salomon, R.; Attie, T.; Pelet, A.; Trang, H.; Mokhtari, M.; Gaultier, C.; Munnich, A.; Lyonnet, S.: Mutations of the RET-GDNF signaling pathway in Ondine's curse. (Letter) Am. J. Hum. Genet. 62:715-717, 1998.
[6483] 586. Angrist, M.; Bolk, S.; Thiel, B.; Puffenberger, E. G.; Hofstra, R. M.; Buys, C. H. C. M.; Cass, D. T.; Chakravarti, A.: Mutation analysis of the RET receptor tyrosine kinase in Hirsch sprung disease. Hum. Molec. Genet. 4: 821-830, 1995.
[6484] 587. Antinolo, G.; Marcos, I.; Fernandez, R. M.; Romero, M.; Borrego, S.: A novel germline point mutation, c.2304G (T, in codon 768 of the RET proto-oncogene in a patient with medullary thyroid carcinoma. (Letter) Am. J. Med. Genet. 110: 85-87, 2002.
[6485] 588. Attie, T.; Pelet, A.; Edery, P.; Eng, C.; Mulligan, L. M.; Amiel, J.; Boutrand, L.; Beldjord, C.; Nihoul-Fekete, C.; Munnich, A.; Ponder, B. A. J.; Lyonnet, S.: Diversity of RET proto-oncogene mutations in familial and sporadic Hirsch sprung disease. Hum. Molec. Genet. 4:1381-1386, 1995.
[6486] 589. Attie-Bitach, T.; Abitbol, M.; Gerard, M.; Delezoide, A.-L.; Auge, J.; Pelet, A.; Amiel, J.; Pachnis, V.; Munnich, A.; Lyonnet, S.; Vekemans, M.: Expression of the RET protooncogene in human embryos. Am. J. Med. Genet. 80: 481-486, 1998.
[6487] 590. Auricchio, A.; Griseri, P.; Carpentieri, M. L.; Betsos, N.; Staiano, A.; Tozzi, A.; Priolo, M.; Thompson, H.; Bocciardi, R.; Romeo, G.; Ballabio, A.; Ceccherini, I.: Double heterozygosity for a RET substitution interfering with splicing and an EDNRB missense mutation in Hirschsprung disease. (Letter) Am. J. Hum. Genet. 64: 1216-1221, 1999.
[6488] 591. Batourina, E.; Choi, C.; Paragas, N.; Bello, N.; Hensle, T.; Costantini, F. D.; Schuchardt, A.; Bacallao, R. L.; Mendelsohn, C. L.: Distalureter morphogenesis depends on epithelial cell remodeling mediated by vitamin A and Ret. Nature Genet. 32: 109-115, 2002. Note: Erratum: Nature Genet. 32: 331 only, 2002.
[6489] 592. Batourina, E.; et al; et al: Vitamin A controls epithelial/mesenchymal interactions through Ret expression. Nature Genet. 27: 74-78, 2001.
[6490] 593. Berndt, I.; Reuter, M.; Saller, B.; Frank-Raue, K.; Groth, P.: Grubendorf, M.; Raue, F.; Ritter, M. M.; Hoppner, W.: A new hot spot for mutations in the ret protooncogene causing familial medullary thyroid carcinoma and multiple endocrine neoplasia type 2A. J. Clin. Endocr. Metab. 83: 770-774, 1998.
[6491] 594. Boccia, L. M.; Green, J. S.; Joyce, C.; Eng, C.; Taylor, S. A. M.; Mulligan, L. M.: Mutation of RET codon 768 is associated with the FMTC phenotype. Clin. Genet. 51: 81-85, 1997.
[6492] 595. Bolino, A.; Schuffenecker, I.; Luo, Y.; Seri, M.; Silengo, M.; Tocco, T.; Chabrier, G.; Houdent, C.; Murat, A.; Schlumberger, M.; Tourniaire, J.; Lenoir, G. M.; Romeo, G.: RET mutations in exons 13 and 14 of FMTC patients. Oncogene 10: 2415-2419, 1995.
[6493] 596. Bolk, S.; Angrist, M.; Schwartz, S.; Silvestri, J. M.; Weese-Mayer, D. E.; Chakravarti, A.: Congenital central hypoventilation syndrome: mutation analysis of the receptor tyrosine kinase RET. Am. J. Med. Genet. 63: 603-609, 1996.
[6494] 597. Bolk Gabriel, S.; Salomon, R.; Pelet, A.; Angrist, M.; Amiel, J.; Formage, M.; Attie-Bitach, T.; Olson, J. M.; Hofstra, R.; Buys, C.; Steffann, J.; Munnich, A.; Lyonnet, S.; Chakravarti, A.: Segregation at three loci explains familial and population risk in Hirschsprung disease. Nature Genet. 31: 89-93, 2002.
[6495] 598. Ceccherini, I.; Hofstra, R. M.; Luo, Y.; Stulp, R. P.; Barone, V.; Stelwagen, T.; Bocciardi, R.; Nijveen, H.; Bolino, A.; Seri, M.; Ronchetto, P.; Pasini, B.; Bozzano, M.; Buys, C. H. C. M.; Romeo, G.: DNA polymorphisms and conditions for SSCP analysis of the 20 exons of the Ret protooncogene. Oncogene 9: 3025-3029, 1994.
[6496] 599. Navab, M.; Hama-Levy, S.; Van Lenten, B. J.; Fonarow, G. C.; Cardinez, C. J.; Castellani, L. W.; Brennan, M.-L.; Lusis, A. J.; Fogelman, A. M.: Mildly oxidized LDL induces an increased apolipoprotein J/paraoxonaseratio. J. Clin. Invest. 99: 2005-2019, 1997.
[6497] 600. Houchins, J. P.; Yabe, T.; McSherry, C.; Bach, F. H.: DNA sequence analysis of NKG2, a family of related cDNA clones encoding type II integral membrane proteins on human natural killer cells. J. Exp. Med. 173: 1017-1020, 1991.
[6498] 601. Plougastel, B.; Trowsdale, J.: Sequence analysis of a 62-kb region overlapping the human KLRC cluster of genes. Genomics 49: 193-199, 1998.
[6499] 602. Yabe, T.; McSherry, C.; Bach, F. H.; Fisch, P.; Schall, R. P.; Sondel, P. M.; Houchins, J. P.: A multigene family on human chromosome 12 encodes natural killer-cell lectins. Immunogenetics 37: 455-460, 1993.
[6500] 603. Rousseau-Merck, M.-F.; Zahraoui, A.; Touchot, N.; Tavitian, A.; Berger, R.: Chromosome assignment of four RAS-related RAB genes. Hum. Genet. 86: 350-354, 1991.
[6501] 604. Li, F. P.; Decker, H.-J. H.; Zbar, B.; Stanton, V. P., Jr.; Kovacs, G.; Seizinger, B. R.; Aburatani, H.; Sandberg, A. A.; Berg, S.; Hosoe, S.; Brown, R. S.: Clinical and genetic studies of renal cell carcinomas in a family with a constitutional chromosome 3;8 translocation: genetics of familial renal carcinoma. Ann. Intern. Med. 118: 106-111, 1993.
[6502] 605. Ohta, M.; Inoue, H.; Cotticelli, M. G.; Kastury, K.; Baffa, R.; Palazzo, J.; Siprashvili, Z.; Mori, M.; McCue, P.; Druck, T.; Croce, C. M.; Huebner, K.: The FHIT gene, spanning the chromosome 3p14.2 fragile site and renal carcinoma-associated t(3;8) breakpoint, is abnormal in digestive tract cancers. Cell 84: 587-597, 1996.
[6503] 606. Puffenberger, E. G.; Hosoda, K.; Washington, S. S.; Nakao, K.; deWit, D.; Yanagisawa, M.; Chakravarti, A.: A missense mutation of the endothelin-B receptor gene in multigenic Hirschsprung's disease. Cell 79:1257-1266, 1994.
[6504] 607. Svensson, P.-J.; Anvret, M.; Molander, M.-L.; Nordenskjold, A.: Phenotypic variation in a family with mutations in two Hirschsprung-related genes (RET and endothelin receptor B). Hum. Genet. 103: 145-148, 1998.
[6505] 608. Hanks, M.; Wurst, W.; Anson-Cartwright, L.; Auerbach, A. B.; Joyner, A. L.: Rescue of the En-1 mutant phenotype by replacement of En-1 with En-2. Science 269: 679-682, 1995.
[6506] 609. Johnson, R. L.; Tabin, C. J.: Molecular models for vertebrate limb development. Cell 90: 979-990, 1997.
[6507] 610. Salmeen, A.; Andersen, J. N.; Myers, M. P.; Tonks, N. K.; Barford, D.: Molecular basis for the dephosphorylation of the activation segment of the insulin receptor by protein tyrosine phosphatase 1B. Molec. Cell 6: 1401-1412, 2000.
[6508] 611. Polymeropoulos, M. H.; Torres, R.; Yanovski, J. A.; Chandrasekharappa, S. C.; Ledbetter, D. H.: The human corticotropin-releasing factor receptor (CRHR) gene maps to chromosome 17q12-q22. Genomics 28:123-124, 1995.
[6509] 612. Sakai, K.; Yamada, M.; Horiba, N.; Wakui, M.; Demura, H.; Suda, T.: The genomic organization of the human corticotropin-releasing factor type-1 receptor. Gene 219: 125-130, 1998.
[6510] 613. Sillaber, I.; Rammes, G.; Zimmermann, S.; Mahal, B.; Zieglgansberger, W.; Wurst, W.; Holsboer, F.; Spanagel, R.: Enhanced and delayed stress-induced alcohol drinking in mice lacking functional CRH1 receptors. Science 296:931-933, 2002.
[6511] 614. Smith, G. W.; Aubry, J.-M.; Dellu, F.; Contarino, A.; Bilezikjian, L. M.; Gold, L. H.; Chen, R.; Marchuk, Y.; Hauser, C.; Bentley, C. A.; Sawchenko, P. E.; Koob, G. F.; Vale, W.; Lee, K.-F.: Corticotropin releasing factor receptor 1-deficient mice display decreased anxiety, impaired stress response, and aberrant neuroendocrine development. Neuron 20:1093-1102, 1998.
[6512] 615. Timpl, P.; Spanagel, R.; Sillaber, I.; Kresse, A.; Reul, J. M. H. M.; Stalla, G. K.; Blanquet, V.; Steckler, T.; Holsboer, F.; Wurst, W.: Impaired stress response and reduced anxiety in mice lacking a functional corticotropin-releasing hormone receptor 1. Nature Genet. 19:162-166, 1998.
[6513] 616. Brissenden, J. E.; Derynck, R.; Francke, U.: Transforming growth factor alpha gene (TGFA) maps to human chromosome 2 close to the breakpoint of the t(2;8) variant translocation in Burkitt lymphoma. (Abstract) Cytogenet. Cell Genet. 40: 589 only, 1985.
[6514] 617. Collin, G. B.; Marshall, J. D.; Naggert, J. K.; Nishina, P. M.: TGFA: exon-intron structure and evaluation as a candidate gene for Alstrom syndrome. (Letter) Clin. Genet. 55: 61-62, 1999.
[6515] 618. Ellis, D. L.; Kafka, S. P.; Chow, J. C.; Nanney, L. B.; Inman, W. H.; McCadden, M. E.; King, L. E., Jr.: Melanoma, growth factors, acanthosis nigricans, the sign of Leser-Trelat, and multiple acrochordons: a possible role for alpha-transforming growth factor in cutaneous paraneoplastic syndromes. New Eng. J. Med. 317: 1582-1587, 1987.
[6516] 619. Fernandez-Larrea, J.; Merlos-Suarez, A.; Urena, J. M.; Baselga, J.; Arribas, J.: A role for a PDZ protein in the early secretory pathway for the targeting of proTGF-alpha to the cell surface. Molec. Cell 3: 423-433, 1999.
[6517] 620. Fowler, K. J.; Mann, G. B.; Dunn, A. R.: Linkage of the murine transforming growth factor-alpha gene with Igk, Ly-2, and Fabp1 on chromosome 6. Genomics 16: 782-784, 1993.
[6518] 621. Tam, J. P.; Scheikh, M. A.; Solomon, D. S.; Ossowski, L.: Efficient synthesis of human type alpha transforming growth factor: its physical and biological characterization. Proc. Nat. Acad. Sci. 83: 8082-8086, 1986.
[6519] 622. Tricoli, J. V.; Nakai, H.; Byers, M. G.; Rall, L. B.; Bell, G. I.; Shows, T. B.: Assignment of the gene coding for human TGF-alpha to chromosome 2p13. (Abstract) Cytogenet. Cell Genet. 40: 762 only, 1985.
[6520] 623. Tricoli, J. V.; Nakai, H.; Byers, M. G.; Rall, L. B.; Bell, G. I.; Shows, T. B.: The gene for human transforming growth factor alpha is on the short arm of chromosome 2. Cytogenet. Cell Genet. 42:94-98, 1986.
[6521] 624. Kikuchi, S.; Hata, M.; Fukumoto, K.; Yamane, Y.; Matsui, T.; Tamura, A.; Yonemura, S.; Yamagishi, H.; Keppler, D.; Tsukita, S.; Tsukita, S.: Radixin deficiency causes conjugated hyperbilirubinemia with loss of Mrp2 from bile canalicular membranes. Nature Genet. 31:320-325, 2002.
[6522] 625. Wilgenbus, K. K.; Milatovich, A.; Francke, U.; Furthmayr, H.: Molecular cloning, cDNA sequence, and chromosomal assignment of the human radix in gene and two dispersed pseudo genes. Genomics 16: 199-206, 1993.
[6523] 626. Zahraoui, A.; Touchot, N.; Chardin, P.; Tavitian, A.: The human rab genes encode a family of GTP-binding proteins related to yeast YPT1 and SEC4 products involved in secretion. J. Biol. Chem. 264:12394-12401, 1989.
[6524] 627. Shimizu, A.; Sakai, Y.; Ohno, K.; Masaki, S.; Kuwano, R.; Takahashi, Y.; Miyashita, N.; Watanabe, T.: A molecular genetic linkage map of mouse chromosome 10, including the Myb, S100b, Pah, SI, and Ifg genes. Biochem. Genet. 30: 529-535, 1992.
[6525] 628. Tan, M.; Jing, T.; Lan, K.-H.; Neal, C. L.; Li, P.; Lee, S.; Fang, D.; Nagata, Y.; Liu, J.; Arlinghaus, R.; Hung, M.-C.; Yu, D.: Phosphorylation on tyrosine-15 of p34(Cdc2) by ErbB2 inhibits p34(Cdc2) activation and is involved in resistance to taxol-induced apoptosis. Molec. Cell 9: 993-1004, 2002.
[6526] 629. Spicer, A. P.; Seldin, M. F.; Olsen, A. S.; Brown, N.; Wells, D. E.; Doggett, N. A.; Itano, N.; Kimata, K.; Inazawa, J.; McDonald, J. A.: Chromosomal localization of the human and mouse hyaluronan synthase genes. Genomics 41: 493-497, 1997.
[6527] 630. Watanabe, K.; Yamaguchi, Y.: Molecular identification of a putative human hyaluronan synthase. J. Biol. Chem. 271: 22945-22948, 1996.
[6528] 631. Cahill, D. P.; da Costa, L. T.; Carson-Walter, E. B.; Kinzler, K. W.; Vogelstein, B.; Lengauer, C.: Characterization of MAD2B and other mitotic spindle checkpoint genes. Genomics 58: 181-187, 1999.
[6529] 632. Chen, R.-H.; Waters, J. C.; Salmon, E. D.; Murray, A. W.: Association of spindle assembly checkpoint component XMAD2 with unattached kinetochores. Science 274:242-245, 1996.
[6530] 633. Dobles, M.; Liberal, V.; Scott, M. L.; Benezra, R.; Sorger, P. K.: Chromosome missegregation and apoptosis in mice lacking the mitotic checkpoint protein Mad2. Cell 101: 635-645, 2000.
[6531] 634. Krishnan, R.; Goodman, B.; Jin, D.-Y.; Jeang, K.-T.; Collins, C.; Stetten, G.; Spencer, F.: Map location and gene structure of the Homo sapiens mitotic arrest deficient 2 (MAD2L1) gene at 4q27. Genomics 49:475-478, 1998.
[6532] 635. Li, X.; Nicklas, R. B.: Mitotic forces control a cell-cycle checkpoint. Nature 373:630-632, 1995.
[6533] 636. Li, Y.; Benezra, R.: Identification of a human mitotic checkpoint gene: hsMAD2. Science 274: 246-248, 1996.
[6534] 637. Luo, X.; Tang, Z.; Rizo, J.; Yu, H.: The Mad2 spindle checkpoint protein undergoes similar major conformational changes upon binding to either Mad1 or Cdc20. Molec. Cell 9: 59-71, 2002.
[6535] 638. Michel, L. S.; Liberal, V.; Chatterjee, A.; Kirchwegger, R.; Pasche, B.; Gerald, W.; Dobles, M.; Sorger, P. K.; Murty, V. V. V. S.; Benezra, R.: MAD2 haplo-insufficiency causes premature anaphase and chromosome instability in mammalian cells. Nature 409: 355-359, 2001.
[6536] 639. Nelson, K. K.; Schlondorff, J.; Blobel, C. P.: Evidence for an interaction of the metalloprotease-disintegrin tumour necrosis factor alpha convertase (TACE) with mitotic arrest deficient 2 (MAD2), and of the metalloprotease-disintegrin MDC9 with a novel MAD2-related protein, MAD2-beta. Biochem. J. 343: 673-680, 1999.
[6537] 640. Shonn, M. A.; McCarroll, R.; Murray, A. W.: Requirement of the spindle checkpoint for proper chromosome segregation in budding yeast meiosis. Science 289: 300-303, 2000.
[6538] 641. Xu, L.; Deng, H. X.; Yang, Y.; Xia, J. H.; Hung, W. Y.; Siddque, T.: Assignment of mitotic arrest deficient protein 2 (MAD2L1) to human chromosome band 5q23.3 by in situ hybridization. Cytogenet. Cell Genet. 78: 63-64, 1997.
[6539] 642. Liu, Y.; Chiu, I.-M.: Assignment of FGF12, the human FGF homologous factor 1 gene, to chromosome 3q29-3qter by fluorescence in situ hybridization. Cytogenet. Cell Genet. 78: 48-49, 1997.
[6540] 643. Caslini, C.; Spinelli, O.; Cazzaniga, G.; Golay, J.; De Gioia, L.; Pedretti, A.; Breviario, F.; Amaru, R.; Barbui, T.; Biondi, A.; Introna, M.; Rambaldi, A.: Identification of two novel isoforms of the ZNF162 gene: a growing family of signal transduction and activator of RNA proteins. Genomics 42: 268-277, 1997.
[6541] 644. Kramer, A.; Quentin, M.; Mulhauser, F.: Diverse modes of alternative splicing of human splicing factor SF1 deduced from the exon-intron structure of the gene. Gene 211: 29-37, 1998.
[6542] 645. Imhof, M. O.; McDonnell, D. P.: Yeast RSP5 and its human homolog hRPF1 potentiate hormone-dependent activation of transcription by human progesterone and glucocorticoid receptors. Molec. Cell. Biol. 16:2594-2605, 1996.
[6543] 646. Kumar, S.; Harvey, K. F.; Kinoshita, M.; Copeland, N. G.; Noda, M.; Jenkins, N. A.: cDNA cloning, expression analysis, and mapping of the mouse Nedd4 gene. Genomics 40: 435-443, 1997.
[6544] 647. Bennett, E. P.; Hassan, H,.; Clausen, H.: cDNA cloning and expression of a novel human UDPN-acetyl-alpha-D-galactosamine. J. Biol. Chem. 271:17006-17012, 1996.
[6545] 648. Bennett, E. P.; Weghuis, D. O.; Merkx, G.; Geurts van Kessel, A.; Eiberg, H.; Clausen, H.: Genomic organization and chromosomal localization of three members of the UDP-N-acetylgalactosamine: polypeptide N-acetylgalactosaminyltransferase family. Glycobiology 8: 547-555, 1998.
[6546] 649. Zara, J.; Hagen, F. K.; Ten Hagen, K. G.; Van Wuyckhuyse, B. C.; Tabak, L. A.: Cloning and expression of mouse UDPGal NAc: polypeptide-N-acetylgalactosaminyltransferase-T3. Biochem. Biophys. Res. Commun. 228:38-44, 1996.
[6547] 650. Blake, D. J.; Nawrotzki, R.; Loh, N. Y.; Gorecki, D. C.; Davies, K. E.: Beta-dystrobrevin, a member of the dystrophin-related protein family. Proc. Nat. Acad. Sci. 95: 241-246, 1998.
[6548] 651. England, S. K.; Uebele, V. N.; Shear, H.; Kodali, J.; Bennett, P. B.; Tamkun, M. M.: Characterization of a voltage-gated K+ channel beta subunit expressed in human heart. Proc. Nat. Acad. Sci. 92:6309-6313, 1995.
[6549] 652. Jones, J. M.; Bentley, E.; Meisler, M. H.; Darling, S. M.: Genetic mapping of the voltage-gated shaker potassium channel beta subunit Kcnab1 to mouse chromosome 3. Mammalian Genome 9: 260 only, 1998.
[6550] 653. Leicher, T.; Bahring, R.; Isbrandt, D.; Pongs, O.: Coexpression of the KCNA3B gene product with Kv1.5 leads to a novel A-type potassium channel. J. Biol. Chem. 273: 35095-35101, 1998.
[6551] 654. Leicher, T. Roeper, J.; Weber, K.; Wang, X.; Pongs, O.: Structural and functional characterization of human potassium channel subunit beta-1 (KCNA1B). Neuropharmacology 35: 787-795, 1996.
[6552] 655. McCormack, K.; McCormack, T.; Tanouye, M.; Rudy, B.; Stuhmer, W.: Alternative splicing of the human Shaker K+ channel beta-1 gene and functional expression of the beta-2 gene product. FEBS Lett. 370:32-36, 1995.
[6553] 656. Schultz, D.; Litt, M.; Smith, L.; Thayer, M.; McCormack, K.: Localization of two potassium channel beta subunit genes, KCNA1B and KCNA2B. Genomics 31:389-391, 1996.
[6554] 657. Kanai, N.; Lu, R.; Satriano, J. A.; Bao, Y.; Wolkoff, A. W.; Schuster, V. L.: Identification and characterization of a prostaglandin transporter. Science 268:866-869, 1995.
[6555] 658. Lu, R.; Kanai, N.; Bao, Y.; Schuster, V. L.: Cloning, in vitro expression, and tissue distribution of a human prostaglandin transporter cDNA (hPGT). J. Clin. Invest. 98: 1142-1149, 1996.
[6556] 659. Lu, R.; Schuster, V. L.: Molecular cloning of the gene for the human prostaglandin transporter hPGT: gene organization, promoter activity, and chromosomal localization. Biochem. Biophys. Res. Commun. 246:805-812, 1998.
[6557] 660. Loughna, S.; Sato, T. N.: A combinatorial role of angiopoietin-1 and orphan receptor TIE1 pathways in establishing vascular polarity during angiogenesis. Molec. Cell 7: 233-239, 2001.
[6558] 661. Yu, H.; Peters, J.-M.; King, R. W.; Page, A. M.; Hieter, P.; Kirschner, M. W.: Identification of a cull in homology region in a subunit of the anaphase-promoting complex. Science 279: 1219-1222, 1998.
[6559] 662. Zhao, N.; Lai, F.; Fernald, A. A.; Eisenbart, J. D.; Espinosa, R., III.; Wang, P. W.; Le Beau, M. M.: Human CDC23: cDNA cloning, mapping to 5q31, genomic structure, and evaluation as a candidate tumor suppressor gene in myeloid leukemias. Genomics 53: 184-190, 1998.
[6560] 663. Brambilla, R.; Draetta, G.: Molecular cloning of PISSLRE, a novel putative member of the cdk family of protein serine/threonine kinases. Oncogene 9:3037-3041, 1994.
[6561] 664. Grana, X.; Claudio, P. P.; De Luca, A.; Sang, N.; Giordano, A.: PISSLRE, a human novel CDC2-related protein kinase. Oncogene 9:2097-2103, 1994.
[6562] 665. Deak, M.; Clifton, A. D.; Lucocq, J. M.; Alessi, D. R.: Mitogen- and stress-activated protein kinase-1 (MSK1) is directly activated by MAPK and SAPK2/p38, and may mediate activation of CREB. EMBO J. 17:4426-4441, 1998.
[6563] 666. Jiang, C.; Yu, L.; Tu, Q.; Zhao, Y.; Zhang, H.; Zhao, S.: Assignment of a member of the ribosomal protein S6 kinase family, RPS6KA5, to human chromosome 14q31-q32.1 by radiation hybrid mapping. Cytogenet. Cell Genet. 87: 261-261, 1999.
[6564] 667. Marsters, S. A.; Sheridan, J. P.; Pitti, R. M.; Huang, A.; Skubatch, M.; Baldwin, D.; Yuan, J.; Gurney, A.; Goddard, A. D.; Godowski, P.; Ashkenazi, A.: A novel receptor for Apo2L/TRAIL contains a truncated death domain. Curr. Biol. 7: 1003-1006, 1997.
[6565] 668. MacFarlane, M.; Ahmad, M.; Srinivasula, S. M.; Fernandes-Alnemri, T.; Cohen, G. M.; Alnemri, E. S.: Identification and molecular cloning of two novel receptors for the cytotoxic ligand TRAIL. J. Biol. Chem. 272:25417-25420, 1997.
[6566] 669. Pai, S. I.; Wu, G. S.; Ozoren, N.; Wu, L.; Jen, J.; Sidransky, D.; El-Deiry, W. S.: Rare loss-of-function mutation of a death receptor gene in head and neck cancer. Cancer Res. 58: 3513-3518, 1998.
[6567] 670. Pan, G.; Ni, J.; Wei, Y.-F.; Yu, G.; Gentz, R.; Dixit, V. M.: An antagonist decoy receptor and a death domain-containing receptor for TRAIL. Science 277: 815-818, 1997.
[6568] 671. Schneider, P.; Bodmer, J.-L.; Thome, M.; Hofmann, K.; Holler, N.; Tschopp, J.: Characterization of two receptors for TRAIL. FEBS Lett. 416:329-334, 1997.
[6569] 672. Screaton, G. R.; Mongkolsapaya, J.; Xu, X.-N.; Cowper, A. E.; McMichael, A. J.; Bell, J. I.: TRICK2, a new alternatively spliced receptor that transduces the cytotoxic signal from TRAIL. Curr. Biol. 7:693-696, 1997.
[6570] 673. Sheridan, J. P.; Marsters, S. A.; Pitti, R. M.; Gurney, A.; Skubatch, M.; Baldwin, D.; Ramakrishnan, L.; Gray, C. L.; Baker, K.; Wood, W. I.; Goddard, A. D.; Godowski, P.; Ashkenazi, A.: Control of TRAIL-induced apoptosis by a family of signaling and decoy receptors. Science 277:818-821, 1997.
[6571] 674. Nakamura, T.; Takeuchi, K.; Muraoka, S.; Takezoe, H.; Takahashi, N.; Mori, N.: A neurally enriched coronin-like protein, ClipnC, is a novel candidate for an actin cytoskeleton-cortical membrane-linking protein. J. Biol. Chem. 274: 13322-13327, 1999.
[6572] 675. Abbaszade, I.; Liu, R.-Q.; Yang, F.; Rosenfeld, S. A.; Ross, O. H.; Link, J. R.; Ellis, D. M.; Tortorella, M. D.; Pratta, M. A.; Hollis, J. M.; Wynn, R.; Duke, J. L.; and 15 others: Cloning and characterization of ADAMTS11, an aggrecanase from the ADAMTS family. J. Biol. Chem. 274:23443-23450, 1999.
[6573] 676. Hagiwara, T.; Tanaka, K.; Takai, S.; Maeno-Hikichi, Y.; Mukainaka, Y.; Wada, K.: Genomic organization, promoter analysis, and chromosomal localization of the gene for the mouse glial high-affinity glutamate transporter Slc1a3. Genomics 33: 508-515, 1996.
[6574] 677. Harada, T.; Harada, C.; Watanabe, M.; Inoue, Y.; Sakagawa, T.; Nakayama, N.; Sasaki, S.; Okuyama, S.; Watase, K.; Wada, K.; Tanaka, K.: Functions of the two glutamate transporters GLAST and GLT-1 in the retina. Proc. Nat. Acad. Sci. 95: 4663-4666, 1998.
[6575] 678. Keppen, L. D.; Gollin, S. M.; Edwards, D.; Sawyer, J.; Wilson, W.; Overhauser, J.: Clinical phenotype and molecular analysis of a three-generation family with an interstitial deletion of the short arm of chromosome 5. Am. J. Med. Genet. 44: 356-360, 1992.
[6576] 679. Kirschner, M. A.; Arriza, J. L.; Copeland, N. G.; Gilbert, D. J.; Jenkins, N. A.; Magenis, E.; Amara, S. G.: The mouse and human excitatory amino acid transporter gene (EAAT1) maps to mouse chromosome 15 and a region of syntenic homology on human chromosome 5. Genomics 22:631-633, 1994.
[6577] 680. Shashidharan, P.; Huntley, G. W.; Meyer, T.; Morrison, J. H.; Plaitakis, A.: Neuron-specific human glutamate transporter: molecular cloning, characterization and expression in human brain. Brain Res. 662:245-250, 1994.
[6578] 681. Stoffel, W.; Sasse, J.; Duker, M.; Muller, R.; Hofmann, K.; Fink, T.; Lichter, P.: Human high affinity, Na(+)-dependent L-glutamate/L-aspartate transporter GLAST-1 (EAAT-1): gene structure and localization to chromosome 5p11-p12. FEBS Lett. 386: 189-193, 1996.
[6579] 682. Takai, S.; Yamada, K.; Kawakami, H.; Tanaka, K.; Nakamura, S.: Localization of the gene (SLC1A3) encoding human glutamate transporter (GluT-1) to 5p13 by fluorescence in situ hybridization. Cytogenet. Cell Genet. 69: 209-210, 1995.
[6580] 683. LeClair, K. P.; Rabin, M.; Nesbitt, M. N.; Pravtcheva, D.; Ruddle, F. H.; Palfree, R. G. E.; Bothwell, A.: Murine Ly-6 multigene family is located on chromosome 15. Proc. Nat. Acad. Sci. 84: 1638-1642, 1987.
[6581] 684. Fischer, A.; Durandy, A.; Sterkers, G.; Griscelli, C.: Role of the LFA-1 molecule in cellular interactions required for antibody production in humans. J. Immun. 136: 3198-3203, 1986.
[6582] 685. Marlin, S. D.; Morton, C. C.; Anderson, D. C.; Springer, T. A.: LFA-1 immunodeficiency disease: definition of the genetic defect and chromosomal mapping of alpha and beta subunits of the lymphocyte function-associated antigen 1 (LFA-1) by complementation in hybrid cells. J. Exp. Med. 164: 855-867, 1986.
[6583] 686. Blackwood, E.; Eisenman, R. N.: Max: a helix-loop-helix zipper protein that forms a sequence-specific DNA-binding complex with Myc. Science 251:1211-1217, 1991.
[6584] 687. Eisenman, R. N.: Personal Communication. Seattle, Wash. Jul. 27, 1994.
[6585] 688. Gilladoga, A. D.; Edelhoff, S.; Blackwood, E. M.; Eisenman, R. N.; Disteche, C. M.: Mapping of MAX to human chromosome 14 and mouse chromosome 12 by in situ hybridization. Oncogene 7: 1249-1251, 1992.
[6586] 689. Bulavin, D. V.; Higashimoto, Y.; Popoff, I. J.; Gaarde, W. A.; Basrur, V.; Potapova, O.; Appella, E.; Formace, A. J., Jr.: Initiation of a G2/M checkpoint after ultraviolet radiation requires p38 kinase. Nature 411:102-107, 2001.
[6587] 690. Doonan, S.; Barra, D.; Bossa, F.: Structural and genetic relationships between cytosolic and mitochondrial isoenzymes. Int. J. Biochem. 16:1193-1199, 1984.
[6588] 691. Copeland, N. G.; Silan, C. M.; Kingsley, D. M.; Jenkins, N. A.; Cannizzaro, L. A.; Croce, C. M.; Huebner, K.; Sims, J. E.: Chromosomal location of murine and human IL-1 receptor genes. Genomics 9: 44-50, 1991.
[6589] 692. Dale, M.; Nicklin, M. J.: Interleukin-1 receptor cluster: gene organization of IL1R2, IL1R1, IL1RL2 (IL-1Rrp2), IL1RL1 (T1/ST2), and IL18R1 (IL-1Rrp) on human chromosome 2q. Genomics 57: 177-179, 1999.
[6590] 693. Dower, S. K.; Kronheim, S. R.; Hopp, T. P.; Cantrell, M.; Deeley, M.; Gillis, S.; Henney, C. S.; Urdal, D. L.: The cell surface receptors for interleukin-1(alpha) and interleukin-1(beta) are identical. Nature 324:266-268, 1986.
[6591] 694. Sims, J. E.; Acres, R. B.; Grubin, C. E.; McMahan, C. J.; Wignall, J. M.; March, C. J.; Dower, S. K.: Cloning the interleukin 1 receptor from human T cells. Proc. Nat. Acad. Sci. 86: 8946-8950, 1989.
[6592] 695. Justice, M. J.; Siracusa, L. D.; Gilbert, D. J.; Heisterkamp, N.; Groffen, J.; Chada, K.; Silan, C. M.; Copeland, N. G.; Jenkins, N. A.: A genetic linkage map of mouse chromosome 10: localization of eighteen molecular markers using a single interspecific backcross. Genetics 125:855-866, 1990.
[6593] 696. Smith, E. P.; Boyd, J.; Frank, G. R.; Takahashi, H.; Cohen, R. M.; Specker, B.; Williams, T. C.; Lubahn, D. B.; Korach, K. S.: Estrogen resistance caused by a mutation in the estrogen-receptor gene in a man. New Eng. J. Med. 331: 1056-1061, 1994.
[6594] 697. Costa, R. M.; Federov, N. B.; Kogan, J. H.; Murphy, G. G.; Stern, J.; Ohno, M.; Kucherlapati, R.; Jacks, T.; Silva, A. J.: Mechanism for the learning deficits in a mouse model of neurofibromatosis type 1. Nature 415: 526-530, 2002.
[6595] 698. van de Vijver, M. J.; Peterse, J. L.; Mooi, W. J.; Wisman, P.; Lomans, J.; Dalesio, O.; Nusse, R.: NEU-protein overexpression in breast cancer: association with come do-type ductal carcinoma in situ and limited prognostic value in stage II breast cancer. New Eng. J. Med. 319: 1239-1245, 1988.
[6596] 699. Xie, D.; Shu, X. O.; Deng, Z.; Wen, W.-Q.; Creek, K. E.; Dai, Q., Gao, Y.-T.; Jin, F.; Zheng, W.: Population-based, case-control study of HER2 genetic polymorphism and breast cancer risk. J. Nat. Cancer Inst. 92: 412-417, 2000.
[6597] 700. Yamamoto, T.; Ikawa, S.; Akiyama, T.; Semba, K.; Nomura, N.; Miyajima, N.; Saito, T.; Toyoshima, K.: Similarity of protein encoded by the human c-erb-B-2 gene to epidermal growth factor receptor. Nature 319:230-234, 1986.
[6598] 701. Yang-Feng, T. L.; Schechter, A. L.; Weinberg, R. A.; Francke, U.: Oncogene from rat neuro/glioblastomas (human gene symbol NGL) is located on the proximal long arm of human chromosome 17 and EGFR is confirmed at 7p13-q11.2. (Abstract) Cytogenet. Cell Genet. 40:784 only, 1985.
[6599] 702. Yu, D.; Jing, T.; Liu, B.; Yao, J.; Tan, M.; McDonnell, T. J.; Hung, M.-C.: Overexpression of ErbB2 blocks Taxol-induced apoptosis by upregulation of p21Cip1, which inhibits p34Cdc2 kinase. Molec. Cell 2: 581-591, 1998.
[6600] 703. Fukuhara, S.; Rowley, J. D.; Variakojis, D.; Sweet, D. L.: Chromosome abnormalities in poorly differentiated lymphocytic lymphoma. Cancer Res. 39: 3119-3128, 1979.
[6601] 704. Ohno, H.; Fukuhara, S.; Takahashi, R.; Mihara, K.; Sugiyama, T.; Doi, S.; Uchino, H.; Toyoshima, K.: c-yes and bcl-2 genes located on 18q21.3 in a follicular lymphoma cell line carrying a t(14;18) chromosomal translocation. Int. J. Cancer 39: 785-788, 1987.
[6602] 705. Semba, K.; Nishizawa, M.; Satoh, H.; Fukushige, S.; Yoshida, M. C.; Sasaki, M.; Matsubara, K.; Yamamoto, T.; Toyoshima, K.: Nucleotide sequence and chromosomal mapping of the human c-yes-2 gene. Jpn. J. Cancer Res. 79: 710-717, 1988.
[6603] 706. Semba, K.; Yamanashi, Y.; Nishizawa, M.; Sukegawa, J.; Yoshida, M.; Sasaki, M.; Yamamoto, T.; Toyoshima, K.: Location of the c-yes gene on the human chromosome and its expression in various tissues. Science 227:1038-1040, 1985.
[6604] 707. Silverman, G. A.; Kuo, W.-L.; Taillon-Miller, P.; Gray, J. W.: Chromosomal reassignment: YACs containing both YES1 and thymidylate synthase map to the short arm of chromosome 18. Genomics 15: 442-445, 1993.
[6605] 708. Sukegawa, J.; Semba, K.; Yamanashi, Y.; Nishizawa, M.; Miyajima, N.; Yamamoto, T.; Toyoshima, K.: Characterization of cDNA clones for the human c-yes gene. Molec. Cell. Biol. 7: 41-47, 1987.
[6606] 709. de Wit, T. P. M.; Morton, H. C.; Capel, P. J. A.; van de Winkel, J. G. J.: Structure of the gene for the human myeloid IgA Fc receptor (CD89). J. Immun. 155: 1203-1209, 1995.
[6607] 710. Kremer, E. J.; Kalatzis, V.; Baker, E.; Callen, D. F.; Sutherland, G. R.; Maliszewski, C. R.: The gene for the human IgA Fc receptor maps to 19q13.4. Hum. Genet. 89: 107-108, 1992.
[6608] 711. Maliszewski, C. R.; March, C. J.; Schoenborn, M. A.; Gimpel, S.; Shen, L.: Expression cloning of a human Fc receptor for IgA. J. Exp. Med. 172: 1665-1672, 1990.
[6609] 712. Monteiro, R. C.; Hostoffer, R. W.; Cooper, M. D.; Bonner, J. R.; Gartland, G. L.; Kubagawa, H.: Definition of immunoglobulin A receptors on eosinophils and their enhanced expression in allergic individuals. J. Clin. Invest. 92: 1681-1685, 1993.
[6610] 713. Narita, I.; Goto, S.; Saito, N.; Sakatsume, M.; Jin, S.; Omori, K.; Gejyo, F.: Genetic polymorphisms in the promoter and 5-prime UTR region of the Fc alpha receptor (CD89) are not associated with a risk of IgA nephropathy. J. Hum. Genet. 46: 694-698, 2001.
[6611] 714. Pleass, R. J.; Andrews, P. D.; Kerr, M. A.; Woof, J. M.: Alternative splicing of the human IgA Fc receptor CD89 in neutrophils and eosinophils. Biochem. J. 318: 771-777, 1996.
[6612] 715. Shimokawa, T.; Tsuge, T.; Okumura, K.; Ra, C.: Identification and characterization of the promoter for the gene encoding the human myeloid IgA Fc receptor (Fc-alpha-R, CD89). Immunogenetics 51: 945-954, 2000.
[6613] 716. Tsuge, T.; Shimokawa, T.; Horikoshi, S.; Tomino, Y.; Ra, C.: Polymorphism in promoter region of Fc-alpha receptor gene in patients with IgA nephropathy. Hum. Genet. 108: 128-133, 2001.
[6614] 717. Dillon, J. S.; Tanizawa, Y.; Wheeler, M. B.; Leng, X.-H.; Ligon, B. B.; Rabin, D. U.; Yoo-Warren, H.; Permutt, M. A.; Boyd, A. E., III: Cloning and functional expression of the human glucagon-like peptide-1 (GLP-1) receptor. Endocrinology 133: 1907-1910, 1993.
[6615] 718. Kershaw, E. E.; Chua, S. C., Jr.; Leibel, R. L.: Localization of a (CA)n repeat in glucagon-like peptide-1 receptor gene (Glp1r) to proximal mouse chromosome 17 and its linkage to other markers. Mammalian Genome 6: 301-303, 1995.
[6616] 719. Stoffel, M.; Espinosa, R., III; Le Beau, M. M.; Bell, G. I.: Human glucagon-like peptide-1 receptor gene: localization to chromosome band 6p21 by fluorescence in situ hybridization and linkage of a highly polymorphic simple tandem repeat DNA polymorphism to other markers on chromosome 6. Diabetes 42: 1215-1218, 1993.
[6617] 720. Thorens, B.: Expression cloning of the pancreatic beta cell receptor for the gluco-incretin hormone glucagon-like peptide 1. Proc. Nat. Acad. Sci. 89: 8641-8645, 1992.
[6618] 721. Cohen, P.; Miyazaki, M.; Socci, N. D.; Hagge-Greenberg, A. Liedtke, W.; Soukas, A. A.; Sharma, R.; Hudgins, L. C.; Ntambi, J. M.; Friedman, J. M.: Role for stearoyl-CoA desaturase-1 in leptin-mediated weightloss. Science 297: 240-243, 2002.
[6619] 722. Blangy, A.; Lane, H. A.; d'Herin, P.; Harper, M.; Kress, M.; Nigg, E. A.: Phosphorylation by p34(cdc2) regulates spindle association of human Eg5, a kinesin-related motor essential for bipolar spindle formation in vivo. Cell 83: 1159-1169, 1995.
[6620] 723. Stewart, R. J.; Pesavento, P. A.; Woerpel, D. N.; Goldstein, L. S. B.: Identification and partial characterization of six members of the kinesin superfamily in Drosophila. Proc. Nat. Acad. Sci. 88:8470-8474, 1991.
[6621] 724. Tihy, F.; Kress, M.; Harper, M.; Dutrillaux, B.; Lemieux, N.: Localization of the human kinesin-related gene to band 10q24 by fluorescencein situ hybridization. Genomics 13: 1371-1372, 1992.
[6622] 725. Tassabehji, M.; Newton, V. E.; Liu, X.-Z.; Brady, A.; Donnai, D.; Krajewska-Walasek, M.; Murday, V.; Norman, A.; Obersztyn, E.; Reardon, W.; Rice, J. C.; Trembath, R.; Wieacker, P.; Whiteford, M.; Winter, R.; Read, A. P.: The mutational spectrum in Waardenburg syndrome. Hum. Molec. Genet. 4: 2131-2137, 1995.
[6623] 726. Cetta, F.; Chiappetta, G.; Melillo, R. M.; Petracci, M.; Montalto, G.; Santoro, M.; Fusco, A.: The ret/ptc1 oncogene is activated in familial adenomatous polyposis-associated thyroid papillary carcinomas. J. Clin. Endocr. Metab. 83: 1003-1006, 1998.
[6624] 727. Decker, R. A.; Peacock, M. L.; Watson, P.: Hirschsprung disease in MEN 2A: increased spectrum of RET exon 10 genotypes and strong genotype-phenotype correlation. Hum. Molec. Genet. 7: 129-134, 1998.
[6625] 728. Donis-Keller, H.; Dou, S.; Chi, D.; Carlson, K. M.; Toshima, K.; Lairmore, T. C.; Howe, J. R.; Moley, J. F.; Goodfellow, P.; Wells, S. A., Jr.: Mutations in the RET protooncogene are associated with MEN 2A and FMTC. Hum. Molec. Genet. 2: 851-856, 1993.
[6626] 729. Doray, B.; Salomon, R.; Amiel, J.; Pelet, A.; Touraine, R.; Billaud, M.; Attie, T.; Bachy, B.; Munnich, A.; Lyonnet, S.: Mutation of the RET ligand, neurturin, supports multigenic inheritance in Hirschsprung disease. Hum. Molec. Genet. 7: 1449-1452, 1998.
[6627] 730. Edery, P.; Lyonnet, S.; Mulligan, L. M.; Pelet, A.; Dow, E.; Abel, L.; Holder, S.; Nihoul-Fekete, C.; Ponder, B. A. J.; Munnich, A.: Mutations of the RET proto-oncogene in Hirschsprung's disease. Nature 367:378-380, 1994.
[6628] 731. Eng, C.: The RET proto-oncogene in multiple endocrine neoplasia type 2 and Hirschsprung's disease. New Eng. J. Med. 335: 943-951, 1996.
[6629] 732. Eng, C.; Crossey, P. A.; Mulligan, L. M.; Healey, C. S.; Houghton, C.; Prowse, A.; Chew, S. L.; Dahia, P. L. M.; O'Riordan, J. L. H.; Toledo, S. P. A.; Smith, D. P.; Maher, E. R.; Ponder, B. A. J.: Mutations in the RET proto-oncogene and the von Hippel-Lindau disease tumour suppressor gene in sporadic and syndromic phaeochromocytomas. J. Clin. Genet. 32: 934-937, 1995.
[6630] 733. Eng, C.; Mulligan, L. M.: Mutations of the RET proto-oncogenein the multiple endocrine neoplasia type 2 syndromes, related sporadic tumours, and Hirschsprung disease. Hum. Mutat. 9: 97-109, 1997.
[6631] 734. Eng, C.; Mulligan, L. M.; Smith, D. P.; Healey, C. S.; Frilling, A.; Raue, F.; Neumann, H. P. H.; Pfragner, R.; Behmel, A.; Lorenzo, M. J.; Stonehouse, T. J.; Ponder, M. A.; Ponder, B. A. J.: Mutation of the RET protooncogene in sporadic medullary thyroid carcinoma. Genes Chromosomes Cancer 12: 209-212, 1995.
[6632] 735. Eng, C.; Smith, D. P.; Mulligan, L. M.; Healey, C. S.; Zvelebil, M. J.; Stonehouse, T. J.; Ponder, M. A.; Jackson, C. E.; Waterfield, M. D.; Ponder, B. A. J.: A novel point mutation in the tyrosine kinase domain of the RET protooncogene in sporadic medullary thyroid carcinoma and in a family with FMTC. Oncogene 10: 509-513, 1995.
[6633] 736. Eng, C.; Smith, D. P.; Mulligan, L. M.; Nagai, M. A.; Healey, C. S.; Ponder, M. A.; Gardner, E.; Scheumann, G. F. W.; Jackson, C. E.; Tunnacliffe, A.; Ponder, B. A. J.: Point mutation within the tyrosine kinase domain of the RET proto-oncogene in multiple endocrine neoplasia type 2B and related sporadic tumors. Hum. Molec. Genet. 3:237-241, 1994.
[6634] 737. Fearon, E. R.: Human cancer syndromes: clues to the origin and nature of cancer. Science 278: 1043-1050, 1997.
[6635] 738. Fitze, G.; Schreiber, M.; Kuhlisch, E.; Schackert, H. K.; Roesner, D.: Association of RET protooncogene codon 45 polymorphism with Hirschsprung disease. (Letter) Am. J. Hum. Genet. 65: 1469-1473, 1999.
[6636] 739. Gardner, E.; Mulligan, L. M.; Eng, C.; Healey, C. S.; Kwok, J. B. J.; Ponder, M. A.; Ponder, B. A. J.: Haplotype analysis of MEN2 mutations. Hum. Molec. Genet. 3: 1771-1774, 1994.
[6637] 740. Grieco, M.; Santoro, M.; Berlingieri, M. T.; Melillo, R. M.; Donghi, R.; Bongarzone, I.; Pierotti, M. A.; Della Porta, G.; Fusco, A.; Vecchio, G.: PTC is a novel rearranged form of the ret proto-oncogene and is frequently detected in vivo in human thyroid papillary carcinomas. Cell 60:557-563, 1990.
[6638] 741. Hofstra, R. M. W.; Landsvater, R. M.; Ceccherini, I.; Stulp, R. P.; Stelwagen, T.; Luo, Y.; Pasini, B.; Hoppener, J. W. M.; Ploosvan Amstel, H. K.; Romeo, G.; Lips, C. J. M.; Buys, C. H. C. M.: A mutation in the RET proto-oncogene associated with multiple endocrine neoplasia type 2B and sporadic medullary thyroid carcinoma. Nature 367:375-376, 1994.
[6639] 742. Hoppener, J. W. M.; Lips, C. J. M.: RET receptor tyrosine kinase gene mutations: molecular biological, physiological and clinical aspects. Europ. J. Clin. Invest. 26: 613-624, 1996.
[6640] 743. Hoppner, W.; Ritter, M. M.: A duplication of 12 bp in the critical cysteine rich domain of the RET protooncogene results in a distinct phenotype of multiple endocrine neoplasia type 2A. Hum. Molec. Genet. 6:587-590, 1997.
[6641] 744. Ikeda, I.; Ishizaka, Y.; Tahira, T.; Suzuki, T.; Onda, M.; Sugimura, T.; Nagao, M.: Specific expression of the ret proto-oncogene in human neuroblastoma cell lines. Oncogene 5: 1291-1296, 1990.
[6642] 745. Ishizaka, Y.; Itoh, F.; Tahira, T.; Ikeda, I.; Sugimura, T.; Tucker, J.; Fertitta, A.; Carrano, A. V.; Nagao, M.: Human ret proto-oncogene mapped to chromosome 10q11.2. Oncogene 4: 1519-1521, 1989.
[6643] 746. Japon, M. A.; Urbano, A. G.; Saez, C.; Segura, D. I.; Cerro, A. L.; Dieguez, C.; Alvarez, C. V.: Glial-derived neurotropic factor and RET gene expression in normal human anterior pituitary cell types and in pituitary tumors. J. Clin. Endocr. Metab. 87: 1879-1884, 2002.
[6644] 747. Julies, M. G.; Moore, S. W.; Kotze, M. J.; du Plessis, L.: Novel RET mutations in Hirschsprung's disease patients from the diverse South African population. Europ. J. Hum. Genet. 9: 419-423, 2001.
[6645] 748. Klugbauer, S.; Demidchik, E. P.; Lengfelder, E.; Rabes, H. M.: Detection of a novel type of RET rearrangement (PTC5) in thyroid carcinomas after Chernobyl and analysis of the involved RET-fused gene RFG5. Cancer Res. 58: 198-203, 1998.
[6646] 749. Amagai, M.; Nishikawa, T.; Nousari, H. C.; Anhalt, G. J.; Hashimoto, T.: Antibodies against desmoglein 3 (pemphigus vulgaris antigen) are present in sera from patients with paraneoplastic pemphigus and cause acantholysis in vivo in neonatal mice. J. Clin. Invest. 102:775-782, 1998.
[6647] 750. Arnemann, J.; Spurr, N. K.; Buxton, R. S.: The human gene (DSG3) coding for the pemphigus vulgaris antigen is, like the genes coding for the other two known desmogleins, assigned to chromosome 18. Hum. Genet. 89: 347-350, 1992.
[6648] 751. Ishikawa, H.; Silos, S. A.; Tamai, K.; Copeland, N. G.; Gilbert, D. J.; Jenkins, N. A.; Uitto, J.: cDNA cloning and chromosomal assignment of the mouse gene for desmoglein 3 (Dsg3), the pemphigus vulgaris antigen. Mammalian Genome 5: 803-804, 1994.
[6649] 752. Silos, S. A.; Tamai, K.; Li, K.; Kivirikko, S.; Kouba, D.; Christiano, A. M.; Uitto, J.: Cloning of the gene for human pemphigus vulgaris antigen (desmoglein 3), a desmosomal cadherin. J. Biol. Chem. 271:17504-17511, 1996.
[6650] 753. Hamajima, N.; Matsuda, K.; Sakata, S.; Tamaki, N.; Sasaki, M.; Nonaka, M.: A novel gene family defined by human dihydropyrimidinase and three related proteins with differential tissue distribution. Gene 180:157-163, 1996.
[6651] 754. Sharp, D.; Blinderman, L.; Combs, K. A.; Kienzle, B.; Ricci, B.; Wager-Smith, K.; Gil, C. M.; Turck, C. W.; Bouma, M.-E.; Rader, D. J.; Aggerbeck, L. P.; Gregg, R. E.; Gordon, D. A.; Wetterau, J. R.: Cloning and gene defects in microsomal triglyceride transfer protein associated with abetalipoproteinaemia. Nature 365: 65-69, 1993.
[6652] 755. Julier, C.; Lathrop, M.; Lalouel, J. M.; Kaplan, J. C.: Use of multilocus tests of gene order: example for chromosome 22. (Abstract) Cytogenet. Cell Genet. 40: 663-664, 1985.
[6653] 756. Julier, C.; Lathrop, M.; Lalouel, J. M.; Reghis, A.; Szajnert, M. F.; Kaplan, J. C.: New restriction fragment length polymorphisms on human chromosome 22 at loci SIS, MB and IGLV. (Abstract) Cytogenet. Cell Genet. 40: 664 only, 1985.
[6654] 757. Julier, C.; Reghis, A.; Szajnert, M. F.; Kaplan, J. C.; Lathrop, G. M.; Lalouel, J. M.: A preliminary linkage map of human chromosome 22. (Abstract) Cytogenet. Cell Genet. 40: 665 only, 1985.
[6655] 758. Bodmer, J. G.; Marsh, S. G. E.; Albert, E.: Nomenclature for factors of the HLA system, 1989. Immun. Today 11: 3-10, 1990.
[6656] 759. Fitzgerald, L. A.; Poncz, M.; Steiner, B.; Rall, S. C., Jr.; Bennett, J. S.; Phillips, D. R.: Comparison of cDNA-derived protein sequences of the human fibronectin and vitronectin receptor alpha-subunits and platelet glycoprotein IIb. Biochemistry 26: 8158-8165, 1987.
[6657] 760. Sosnoski, D.; Emanuel, B. S.; Hawkins, A. L.; van Tuinen, P.; Ledbetter, D. H.; Nussbaum, R. L.; Kaos, F.-T.; Schwartz, E.; Phillips, D.; Bennett, J. S.; Fitzgerald, L. A.; Poncz, M.: Chromosomal localization of the genes for the vitronectin and fibronectin receptors alpha-subunits and for platelet glycoproteins IIb and IIIa. J. Clin. Invest. 81:1993-1998, 1988.
[6658] 761. Spurr, N. K.; Rooke, L.: Confirmation of the assignment of the vitronectin (VNRA) and fibronectin (FNRA) receptor alpha-subunits. Ann. Hum. Genet. 55: 217-223, 1991.
[6659] 762. Akula, S. M.; Pramod, N. P.; Wang, F.-Z.; Chandran, B.: Integrin alpha-3/beta-1 (CD 49c/29) is a cellular receptor for Kaposi's sarcoma-associated herpesvirus (KSHV/HHV-8) entry into the target cells. Cell 108:407-419, 2002.
[6660] 763. Arregui, C.; Pathre, P.; Lilien, J.; Balsamo, J.: The non-receptor tyrosine kinase Fer mediates cross-talk between N-cadherin and beta-1-integrins. J. Cell Biol. 149: 1263-1273, 2000.
[6661] 764. Giuffra, L. A.; Lichter, P.; Wu, J.; Kennedy, J. L.; Pakstis, A. J.; Rogers, J.; Kidd, J. R.; Harley, H.; Jenkins, T.; Ward, D. C.; Kidd, K. K.: Genetic and physical mapping and population studies of a fibronectin receptor beta-subunit-like sequence on human chromosome 19. Genomics 8: 340-346, 1990.
[6662] 765. Giuffra, L. A.; Wu, J.; Lichter, P.; Kennedy, J. L.; Castiglione, C.; Pakstis, A. J.; Ward, D.; Kidd, K. K.: Mapping of a fibronectin receptor beta subunit-like sequence to chromosome 19. (Abstract) Am. J. Hum. Genet. 45 (suppl.): A141 only, 1989.
[6663] 766. Goodfellow, P. J.; Nevanlinna, H. A.; Gorman, P.; Sheer, D.; Lam, G.; Goodfellow, P. N.: Assignment of the gene encoding the beta-subunit of the human fibronectin receptor (beta-FNR) to chromosome 10p11.2. Ann. Hum. Genet. 53: 15-22, 1989.
[6664] 767. Graus-Porta, D.; Blaess, S.; Senften, M.; Littlewood-Evans, A.; Damsky, C.; Huang, Z.; Orban, P.; Klein, R.; Schittny, J. C.; Muller, U.: Beta-1-class integrins regulate the development of laminae and folia in the cerebral and cerebellar cortex. Neuron 31: 367-379, 2001.
[6665] 768. Hynes, R. O.: Integrins: a family of cell surface receptors. Cell 48:549-554, 1987.
[6666] 769. Johansson, S.; Forsberg, E.; Lundgren, B.: Comparison of fibronectin receptors from rat hepatocytes and fibroblasts. J. Biol. Chem. 262:7819-7824, 1987.
[6667] 770. Lu, T. T.; Cyster, J. G.: Integrin-mediated long-term B cell retention in the splenic marginal zone. Science 297: 409-412, 2002.
[6668] 771. Messer Peters, P.; Kamarck, M. E.; Hemler, M. E.; Strominger, J. L.; Ruddle, F. H.: Genetic and biochemical characterization of human lymphocyte cell surface antigens: the A-1A5 and A-3A4 determinants. J. Exp. Med. 159: 1441-1454, 1984.
[6669] 772. Pytela, R.; Pierschbacher, M. D.; Ginsberg, M. H.; Plow, E. F.; Ruoslahti, E.: Platelet membrane glycoprotein IIb/IIIa: member of a family of arg-gly-asp-specific adhesion receptors. Science 231:1159-1162, 1986.
[6670] 773. Woods, V. L., Jr.; Pischel, K. D.; Avery, E. D.; Bluestein, H. G.: Antigenic polymorphism of human very late activation protein-2(platelet glycoprotein Ia-IIa): platelet alloantigen Hc(a). J. Clin. Invest. 83: 978-985, 1989.
[6671] 774. Wu, J. S.; Giuffra, L. A.; Goodfellow, P. J.; Myers, S.; Carson, N. L.; Anderson, L.; Hoyle, L. S.; Simpson, N. E.; Kidd, K. K.: Thebeta subunit locus of the human fibronectin receptor: DNA restriction fragment length polymorphism and linkage mapping studies. Hum. Genet. 83:383-390, 1989.
[6672] 775. Wildhage, I.; Trusheim, H.; Goke, B.; Lankat-Buttgereit, B.: Gene expression of the human glucagon-like peptide-1 receptor is regulated by Sp1 and Sp3. Endocrinology 140: 624-631, 1999.
[6673] 776. Chambers, S. M.; Morris, B. J.: Glucagon receptor gene mutation in essential hypertension. (Letter) Nature Genet. 12: 122, 1996.
[6674] 777. Hager, J.; Hansen, L.; Vaisse, C.; Vionnet, N.; Philippi, A.; Poller, W.; Velho, G.; Carcassi, C.; Contu, L.; Julier, C.; Cambien, F.; Passa, P.; Lathrop, M.; Kindsvogel, W.; Demenais, F.; Nishimura, E.; Froguel, P.: A missense mutation in the glucagon receptor gene is associated with non-insulin-dependent diabetes mellitus. Nature Genet. 9: 299-304, 1995.
[6675] 778. Lok, S.; Kuijper, J. L.; Jelinek, L. J.; Kramer, J. M.; Whitmore, T. E.; Sprecher, C. A.; Mathewes, S.; Grant, F. J.; Biggs, S. H.; Rosenberg, G. B.; Sheppard, P. O.; O'Hara, P. J.; Foster, D. C.; Kindsvogel, W.: The human glucagon receptor encoding gene: structure, cDNA sequence and chromosomal localization. Gene 140: 203-209, 1994.
[6676] 779. Menzel, S.; Stoffel, M.; Espinosa, R., III; Fernald, A. A.; LeBeau, M. M.; Bell, G. I.: Localization of the glucagon receptor gene to human chromosome band 17q25. Genomics 20: 327-328, 1994.
[6677] 780. Bae, J.; Leo, C. P.; Hsu, S. Y.; Hsuch, A. J. W.: MCL-1S, a splicing variant of the antiapoptotic BCL-2 family member MCL-1, encodes aproapoptotic protein possessing only the BH3 domain. J. Biol. Chem. 275:25255-25261, 2000.
[6678] 781. Craig, R. W.; Jabs, E. W.; Zhou, P.; Kozopas, K. M.; Hawkins, A. L.; Rochelle, J. M.; Seldin, M. F.; Griffin, C. A.: Human and mouse chromosomal mapping of the myeloid cell leukemia-1 gene: MCL1 maps to human chromosome 1q21, a region that is frequently altered in preneoplastic and neoplastic disease. Genomics 23: 457-463, 1994.
[6679] 782. Kozopas, K. M.; Yang, T.; Buchan, H. L.; Zhou, P.; Craig, R. W.: MCL1, a gene expressed in programmed myeloid cell differentiation, has sequence similarity to BCL2. Proc. Nat. Acad. Sci. 90: 3516-3520, 1993.
[6680] 783. Rinkenberger, J. L.; Horning, S.; Klocke, B.; Roth, K.; Korsmeyer, S. J.: Mcl-1 deficiency results in peri-implantation embryonic lethality. Genes Dev. 14: 23-27, 2000.
[6681] 784. Pellegata, N. S.; Dieguez-Lucena, J. L.; Joensuu, T.; Lau, S.; Montgomery, K. T.; Krahe, R.; Kivela, T.; Kucherlapati, R.; Forsius, H.; de la Chapelle, A.: Mutations in KERA, encoding keratocan, causecornea plana. Nature Genet. 25: 91-95, 2000.
[6682] 785. Lehmann, J. M.; McKee, D. D.; Watson, M. A.; Willson, T. M.; Moore, J. T.; Kliewer, S. A.: The human orphan nuclear receptor PXR is activated by compounds that regulate CYP3A4 gene expression and cause drug interactions. J. Clin. Invest. 102: 1016-1023, 1998.
[6683] 786. Aberdam, E.; Bertolotto, C.; Sviderskaya, E. V.; de Thillot, V.; Hemesath, T. J.; Fisher, D. E.; Bennett, D. C.; Ortonne, J.-P.; Ballotti, R.: Involvement of microphthalmia in the inhibition of melanocyte lineage differentiation and of melanogenesis by agouti signal protein. J. Biol. Chem. 273: 19560-19565, 1998.
[6684] 787. Bondurand, N.; Pingault, V.; Goerich, D. E.; Lemort, N.; Sock, E.; Le Caignec, C.; Wegner, M.; Goossens, M.: Interaction among SOX10, PAX3 and MITF, three genes altered in Waardenburg syndrome. Hum. Molec. Genet. 9: 1907-1917, 2000.
[6685] 788. Jackson, I. J.; Raymond, S.: Manifestations of microphthalmia. Nature Genet. 8: 209-210, 1994.
[6686] 789. Lalwani, A. K.; Attaie, A.; Randolph, F. T.; Deshmukh, D.; Wang, C.; Mhatre, A.; Wilcox, E.: Point mutation in the MITF gene causing Waardenburg syndrome type II in a three-generation Indian family. Am. J. Med. Genet. 80: 406-409, 1998.
[6687] 790. Moore, K. J.: Insight into the microphthalmia gene. Trends Genet. 11:442-448, 1995.
[6688] 791. Minoshima, S.; Fukuyama, R.; Yamamoto, T.; Shimizu, N.: Mapping of human long-chain acyl-CoA synthetase to chromosome 4. (Abstract) Cytogenet. Cell Genet. 58: 1888 only, 1991.
[6689] 792. Cantu, E. S.; Sprinkle, T. J.; Ghosh, B.; Singh, I.: The human palmitoyl-CoA ligase (FACL2) gene maps to the chromosome 4q34-q35 region by fluorescence in situ hybridization (FISH) and somatic celihybrid panels. Genomics 28: 600-602, 1995.
[6690] 793. Rountree, M. R.; Bachman, K. E.; Baylin, S. B.: DNMT1 binds HDAC2 and a new co-repressor, DMAP1, to form a complex at replication foci. Nature Genet. 25: 269-277, 2000.
[6691] 794. Pyronnet, S.; Imataka, H.; Gingras, A.-C.; Fukunaga, R.; Hunter, T.; Sonenberg, N.: Human eukaryotic translation initiation factor 4G (eIF4G) recruits Mnk1 to phosphorylate eIF4E. EMBO J. 18: 270-279, 1999.
[6692] 795. Waskiewicz, A. J.; Flynn, A.; Proud, C. G.; Cooper, J. A.: Mitogen-activated protein kinases activate the serine/threonine kinases Mnk1 and Mnk2. EMBO J. 16: 1909-1920, 1997.
[6693] 796. Zhang, Y.; Saison, M.; Spaepen, M.; De Strooper, B.; Van Leuven, F.; David, G.; Van den Berghe, H.; Cassiman, J.-J.: Mapping of human fibronectin receptor beta subunit gene to chromosome 10. Somat. Cell Molec. Genet. 14: 99-104, 1988.
[6694] 797. Schoenmakers, E. P. P. M.; Wanschura, S.; Mols, R.; Bullerdiek, J.; Van den Berghe, H.; Van de Ven, W. J. M.: Recurrent rearrangements in the high mobility group protein gene, HMGI-C, in benign mesenchymal tumours. Nature Genet. 10: 436-444, 1995.
[6695] 798. Beck, Y.; Oren, R.; Amit, B.; Levanon, A.; Gorecki, M.; Hartman, J. R.: Human Mn superoxide dismutase cDNA sequence. Nucleic Acids Res. 15: 9076, 1987.
[6696] 799. Church, S. L.; Grant, J. W.; Meese, E. U.; Trent, J. M.: Sublocalization of the gene encoding manganese superoxide dismutase (MnSOD/SOD2) to 6q25 by fluorescence in situ hybridization and somatic cell hybrid mapping. Genomics 14: 823-825, 1992.
[6697] 800. Creagan, R.; Tischfield, J.; Ricciuti, F.; Ruddle, F. H.: Chromosome assignments of genes in man using mouse human somatic cell hybrids: mitochondrial superoxide dismutase (indophenol oxidase-B, tetrameric) to chromosome 6. Humangenetik 20: 203-209, 1973.
[6698] 801. Figueroa, F.; Vincek, V.; Kasahara, M.; Bell, G. I.; Klein, J.: Mapping of the Sod-2 locus into the t complex on mouse chromosome 17. Immunogenetics 28: 260-264, 1988.
[6699] 802. Heckl, K.: Isolation of cDNAs encoding human manganese superoxide dismutase. Nucleic Acids Res. 16: 6224, 1988.
[6700] 803. Li, Y.; Huang, T.-T.; Carlson, E. J.; Melov, S.; Ursell, P. C.; Olson, J. L.; Noble, L. J.; Yoshimura, M. P.; Berger, C.; Chan, P. H.; Wallace, D. C.; Epstein, C. J.: Dilated cardiomyopathy and neonatallethality in mutant mice lacking manganese superoxide dismutase. Nature Genet. 11: 376-381, 1995.
[6701] 804. Melov, S.; Coskun, P.; Patel, M.; Tuinstra, R.; Cottrell, B.; Jun, A. S.; Zastawny, T. H.; Dizdaroglu, M.; Goodman, S. I.; Huang, T.-T.; Miziorko, H.; Epstein, C. J.; Wallace, D. C.: Mitochondrial disease in superoxide dismutase 2 mutant mice. Proc. Nat. Acad. Sci. 96:846-851, 1999.
[6702] 805. Melov, S.; Schneider, J. A.; Day, B. J.; Hinerfeld, D.; Coskun, P.; Mirra, S. S.; Crapo, J. D.; Wallace, D. C.: A novel neurological phenotype in mice lacking mitochondrial manganese superoxide dismutase. Nature Genet. 18: 159-163, 1998.
[6703] 806. Michelson, A. M.; McCord, J. M.; Fridovich, I.: Superoxide and Superoxide Dismutases. New York: Academic Press, 1977.
[6704] 807. Pauling, L.: The discovery of the superoxide radical. Trends Biochem. Sci. 4(11): 270-271, 1979.
[6705] 808. Rosenblum, J. S.; Gilula, N. B.; Lerner, R. A.: On signal sequence polymorphisms and diseases of distribution. Proc. Nat. Acad. Sci. 93:4471-4473, 1996.
[6706] 809. Yoshimitsu, K.; Nichi, Y.; Kobayashi, Y.; Yoshimura, O.; Ohama, K.; Oguma, N.; Usui, T.: Decreased superoxide dismutase-2 activity in a patient with ring chromosome 6. Am. J. Med. Genet. 28: 211-214, 1987.
[6707] 810. Klugbauer, S.; Rabes, H. M.: The transcription coactivator HTIF1 and a related protein are fused to the RET receptor tyrosine kinase in childhood papillary thyroid carcinomas. Oncogene 18: 4388-4393, 1999.
[6708] 811. Lairmore, T. C.; Dou, S.; Howe, J. R.; Chi, D.; Carlson, K.; Veile, R.; Mishra, S. K.; Wells, S. A., Jr.; Donis-Keller, H.: A 1.5-megabase yeast artificial chromosome contig from human chromosome 10q11.2 connecting three genetic loci (RET, D10S94, and D10S102) closely linked to the MEN2A locus. Proc. Nat. Acad. Sci. 90: 492-496, 1993.
[6709] 812. Lombardo, F.; Baudin, E.; Chiefari, E.; Arturi, F.; Bardet, S.; Caillou, B.; Conte, C.; Dallapiccola, B.; Giuffrida, D.; Bidart, J.-M.; Schlumberger, M.; Filetti, S.: Familial medullary thyroid carcinoma: clinical variability and low aggressiveness associated with RET mutation at codon 804. J. Clin. Endocr. Metab. 87: 1674-1680, 2002.
[6710] 813. Lore, F.; Di Cairano, G.; Talidis, F.: Unilateral renal agenesis in a family with medullary thyroid carcinoma. (Letter) New Eng. J. Med. 342: 1218-1219, 2000.
[6711] 814. Machens, A.; Gimm, O.; Hinze, R.; Hoppner, W.; Boehm, B. O.; Dralle, H.: Genotype-phenotype correlations in hereditary medullary thyroid carcinoma: oncological features and biochemical properties. J. Clin. Endocr. Metab. 86: 1104-1109, 2001.
[6712] 815. Mendelsohn, C.; et al; et al: Function of the retinoic acid receptors (RARs) during development (II). Multiple abnormalities at various stages of organogenesis in RAR double mutants. Development 120:2749-2771, 1994.
[6713] 816. Menko, F. H.; van der Luijt, R. B.; de Valk, I. A. J.; Toorians, A. W. F. T.; Sepers, J. M.; van Diest, P. J.; Lips, C. J. M.: A typical MEN type 2B associated with two germline RET mutations on the same allele not involving codon 918. J. Clin. Endocr. Metab. 87: 393-397, 2002.
[6714] 817. Mulligan, L. M.; Kwok, J. B. J.; Healey, C. S.; Elsdon, M. J.; Eng, C.; Gardner, E.; Love, D. R.; Mole, S. E.; Moore, J. K.; Papi, L.; Ponder, M. A.; Telenius, H.; Tunnacliffe, A.; Ponder, B. A. J.: Germ-line mutations of the RET protooncogene in multiple endocrine neoplasia type 2A. Nature 363: 458-460, 1993.
[6715] 818. Munnes, M.; Fanaei, S.; Schmitz, B.; Muiznieks, I.; Holschneider, A. M.; Doerfler, W.: Familial form of Hirschsprung disease: nucleotide sequence studies reveal point mutations in the RET proto-oncogenein two of six families but not in other candidate genes. Am. J. Med. Genet. 94: 19-27, 2000.
[6716] 819. Nakata, T.; Kitamura, Y.; Shimizu, K.; Tanaka, S.; Fujimori, M.; Yokoyama, S.; Ito, K.; Emi, M.: Fusion of a novel gene, ELKS, to RET due to translocation t(10;12)(q11;p13) in a papillary thyroid carcinoma. Genes Chromosomes Cancer 25: 97-103, 1999.
[6717] 820. Niccoli-Sire, P.; Murat, A.; Rohmer, V.; Franc, S.; Chabrier, G.; Baldet, L.; Maes, B.; Savagner, F.; Giraud, S.; Bezieau, S.; Kottler, M.-L.; Morange, S.; Conte-Devolx, B.: The French Calcitonin Tumors Study Group (GETC).: Familial medullary thyroid carcinoma with noncysteine RET mutations: phenotype-genotype relationship in a large series of patients. J. Clin. Endocr. Metab. 86: 3746-3753, 2001.
[6718] 821. Pachnis, V.; Mankoo, B.; Costantini, F.: Expression of the c-ret proto-oncogene during mouse embryogenesis. Development 119: 1005-1017, 1993.
[6719] 822. Pasini, B.; Hofstra, R. M. W.; Yin, L.; Bocciardi, R.; Santamaria, G.; Grootscholten, P. M.; Ceccherini, I.; Patrone, G.; Priolo, M.; Buys, C. H. C. M.; Romeo, G.: The physical map of the human RET proto-oncogene. Oncogene 11:1737-1743, 1995.
[6720] 823. Pelet, A.; Geneste, O.; Edery, P.; Pasini, A.; Chappuis, S.; Attie, T.; Munnich, A.; Lenoir, G.; Lyonnet, S.; Billaud, M.: Various mechanisms cause RET-mediated signaling defects in Hirschsprung's disease. J. Clin. Invest. 101: 1415-1423, 1998.
[6721] 824. Pigny, P.; Bauters, C.; Wemeau, J.-L.; Houcke, M. L.; Crepin, M.; Caron, P.; Giraud, S.; Calender, A.; Buisine, M.-P.; Kerckaert, J.-P.; Porchet, N.: A novel 9-base pair duplication in RET exon 8 in familial medullary thyroid carcinoma. J. Clin. Endocr. Metab. 84:1700-1704, 1999.
[6722] 825. Pierotti, M. A.; Santoro, M.; Jenkins, R. B.; Sozzi, G.; Bongarzone, I.; Grieco, M.; Monzini, N.; Miozzo, M.; Herrmann, M. A.; Fusco, A.; Hay, I. D.; Della Porta, G.; Vecchio, G.: Characterization of an inversion on the long arm of chromosome 10 juxtaposing D10S170 and RET and creating the oncogenic sequence RET/PTC. Proc. Nat. Acad. Sci. 89: 1616-1620, 1992.
[6723] 826. Rodrigues, G. A.; Park, M.: Dimerization mediated through a leucine zipper activates the oncogenic potential of the met receptor tyrosinekinase. Molec. Cell. Biol. 13: 6711-6722, 1993.
[6724] 827. Romeo, G.; Ronchetto, P.; Luo, Y.; Barone, V.; Seri, M.; Ceccherini, I.; Pasini, B.; Bocciardi, R.; Lerone, M.; Kaariainen, H.; Martucciello, G.: Point mutations affecting the tyrosine kinase domain of the RET proto-oncogene in Hirschsprung's disease. Nature 367: 377-378, 1994.
[6725] 828. Salvatore, D.; Barone, M. V.; Salvatore, G.; Melillo, R. M.; Chiappetta, G.; Mineo, A.; Fenzi, G.; Vecchio, G.; Fusco, A.; Santoro, M.: Tyrosines1015 and 1062 are in vivo autophosphorylation sites in Ret and Ret derived oncoproteins. J. Clin. Endocr. Metab. 85: 3898-3907, 2000.
[6726] 829. Robinson, M. F.; Cote, G. J.; Nunziata, V.; Brandi, M. L.; Ferrer, J. P.; Martins Bugalho, M. J. G.; Almeida Ruas, M. M.; Chik, C.; Colantuoni, V.; Gagel, R. F.: Mutation of a specific codon of the RET proto-oncogenein the multiple endocrine neoplasia type 2A/cutaneous lichen amyloidosis-syndrome. (Abstract) Fifth International Workshop on Multiple Endocrine Neoplasia, Stockholm, Archipelago, 1994.
[6727] 830. Klinghoffer, R. A.; Mueting-Nelsen, P. F.; Faerman, A.; Shani, M.; Soriano, P.: The two PDGF receptors maintain conserved signaling in vivo despite divergent embryological functions. Molec. Cell 7:343-354, 2001.
[6728] 831. Kulkarni, S.; Heath, C.; Parker, S.; Chase, A.; Iqbal, S.; Pocock, C. F.; Kaeda, J.; Cwynarski, K.; Goldman, J. M.; Cross, N. C. P.: Fusion of H4/D10S170 to the platelet-derived growth factor receptor beta in BCR-ABL-negative myeloproliferative disorders with a t(5; 10)(q33;q21). Cancer Res. 60: 3592-3598, 2000.
[6729] 832. Leal, F.; Williams, L. T.; Robbins, K. C.; Aaronson, S. A.: Evidence that the v-sis gene product transforms by interaction with the receptor for platelet-derived growth factor. Science 230: 327-330, 1985.
[6730] 833. Matsui, T.; Heidaran, M.; Miki, T.; Popescu, N.; La Rochelle, W.; Kraus, M.; Pierce, J.; Aaronson, S.: Isolation of a novel receptor cDNA establishes the existence of two PDGF receptor genes. Science 243:800-804, 1989.
[6731] 834. Spies, T.; Blanck, G.; Bresnahan, M.; Sands, J.; Strominger, J. L.: A new cluster of genes within the human major histocompatibility complex. Science 243: 214-217, 1989.
[6732] 835. Pischel, K. D.; Marlin, S. D.; Springer, T. A.; Woods, V. L., Jr.; Bluestein, H. G.: Polymorphism of lymphocyte function-associated antigen-1 demonstrated by a lupus patient's alloantiserum. J. Clin. Invest. 79: 1607-1614, 1987.
[6733] 836. Sanchez-Madrid, F.; Nagy, J.; Robbins, E.; Simon, P.; Springer, T. A.: A human leukocyte differentiation antigen family with distinct alpha subunits and a common beta subunit: the lymphocyte function-associated antigen (LFA-1), the C3bi complement receptor (OKM1/Mac-1), and the p150, 95 molecule. J. Exp. Med. 158: 1785-1803, 1983.
[6734] 837. Inoguchi, K.; Yoshioka, H.; Khaleduzzaman, M.; Ninomiya, Y.: The mRNA for alpha-1(XIX) collagen chain, a new member of FACITs, contains a long unusual 3-prime untranslated region and displays many unique splicing variants. J. Biochem. 117: 137-146, 1995.
[6735] 838. Khaleduzzaman, M.; Sumiyoshi, H.; Ueki, Y.; Inoguchi, K.; Ninomiya, Y.; Yoshioka, H.: Structure of the human type XIX collagen (COL19A1) gene, which suggests it has arisen from an ancestor gene of the FACIT family. Genomics 45: 304-312, 1997.
[6736] 839. Myers, J. C.; Sun, M. J.; D'lppolito, J. A.; Jabs, E. W.; Neilson, E. G.; Dion, A. S.: Human cDNA clones transcribed from an unusually high molecular weight RNA encode a new collagen chain. Gene 123:211-217, 1993.
[6737] 840. Yoshioka, H.; Zhang, H.; Ramirez, F.; Mattei, M.-G.; Moradi-Ameli, M.; van der Rest, M.; Gordon, M. K.: Synteny between the loci for a novel FACIT-like collagen (D6S228E) and alpha 1(IX) collagen (COL9A1) on 6q12-q14 in humans. Genomics 13: 884-886, 1992.
[6738] 841. Gerecke, D. R.; Olson, P. F.; Koch, M.; Knoll, J. H. M.; Taylor, R.; Hudson, D. L.; Champliaud, M.-F.; Olsen, B. R.; Burgeson, R. E.: Complete primary structure of two splice variants of collagen XII, and assignment of alpha-1(XII) collagen (COL12A1), alpha-1(IX) collagen (COL9A1), and alpha-1(XIX) collagen (COL19A1) to human chromosome 6q12-q13. Genomics 41: 236-242, 1997.
[6739] 842. Yan, B.; Heus, J.; Lu, N.; Nichols, R. C.; Raben, N.; Plotz, P. H.: Transcriptional regulation of the human acid alpha-glucosidase gene: identification of a repressor element and its transcription factors Hes-1 and YY1. J. Biol. Chem. 276: 1789-1793, 2001.
[6740] 843. Yan, B.; Raben, N.; Plotz, P. H.: Hes-1, a known transcriptional repressor, acts as a transcriptional activator for the human acid alpha-glucosidase gene in human fibroblast cells. Biochem. Biophys. Res. Commun. 291: 582-587, 2002.
[6741] 844. Copeland, N. G.; Gilbert, D. J.; Chretien, M.; Seidah, N. G.; Jenkins, N. A.: Regional localization of three convertases, PC1 (Nec-1), PC2(Nec-2), and furin (Fur), on mouse chromosomes. Genomics 13: 1356-1358, 1992.
[6742] 845. Mbikay, M.; Seidah, N. G.; Chretien, M.; Simpson, E. M.: Chromosomal assignment of the genes for proprotein convertases PC4, PC5, and PACE4 in mouse and human. Genomics 26: 123-129, 1995.
[6743] 846. Seidah, N. G.; Mattei, M. G.; Gaspar, L.; Benjannet, S.; Mbikay, M.; Chretien, M.: Chromosomal assignments of the genes for neuroendocrine convertase PC1 (NEC1) to human 5q15-21, neuroendocrine convertase PC2 (NEC2) to human 20p1.1-11.2, and furin (mouse 7[D1-E2] region). Genomics 11:103-107, 1991.
[6744] 847. Hall, C. R.; Cole, W. G.; Haynes, R.; Hecht, J. T.: Reevaluation of a genetic model for the development of exostosis in hereditary multiple exostosis. Am. J. Med. Genet. 112: 1-5, 2002.
[6745] 848. Sipila, K.; Aula, P.: Database for the mutations of the Finnish disease heritage. Hum. Mutat. 19: 16-22, 2002.
[6746] 849. Lee, H.-K.; Barbarosie, M.; Kameyama, K.; Bear, M. F.; Huganir, R. L.: Regulation of distinct AMPA receptor phosphorylation sites during bidirectional synaptic plasticity. Nature 405: 955-959, 2000.
[6747] 850. Mack, V.; Burnashev, N.; Kaiser, K. M. M.; Rozov, A.; Jensen, V.; Hvalby, O.; Seeburg, P. H.; Sakmann, B.; Sprengel, R.: Conditional restoration of hippocampal synaptic potentiation in GluR-A-deficient mice. Science 292: 2501-2504, 2001.
[6748] 851. Puckett, C.; Gomez, C. M.; Korenberg, J. R.; Tung, H.; Meier, T. J.; Chen, X. N.; Hood, L.: Molecular cloning and chromosomal localization of one of the human glutamate receptor genes. Proc. Nat. Acad. Sci. 88:7557-7561, 1991.
[6749] 852. Shi, S.-H.; Hayashi, Y.; Petralla, R. S.; Zaman, S. H.; Wenthold, R. J.; Svoboda, K.; Malinow, R.: Rapid spine delivery and redistribution of AMPA receptors after synaptic NMDA receptor activation. Science 284:1811-1816, 1999.
[6750] 853. Zamanillo, D.; Sprengel, R.; Hvalby, O.; Jensen, V.; Burnashev, N.; Rozov, A.; Kaiser, K. M. M.; Koster, H. J.; Borchardt, T.; Worley, P.; Lubke, J.; Frotscher, M.; Kelly, P. H.; Sommer, B.; Andersen, P.; Seeburg, P. H.; Sakmann, B.: Importance of AMPA receptors for hippocampal synaptic plasticity but not for spatial learning. Science 284:1805-1811, 1999.
[6751] 854. Berkovitz, G. D.; Guerami, A.; Brown, T. R.; MacDonald, P. C.; Migeon, C. J.: Familial gynecomastia with increased extra glandular aromatization of plasma carbon (19)-steroids. J. Clin. Invest. 75:1763-1769, 1985.
[6752] 855. Hou, J.; Parrish, J.; Ludecke, H.-J.; Sapru, M.; Wang, Y.; Chen, W.; Hill, A.; Siegel-Bartelt, J.; Northrup, H.; Elder, F. F. B.; Chinault, C.; Horsthemke, B.; Wagner, M. J.; Wells, D. E.: A 4-megabase YAC contig that spans the Langer-Giedion syndrome region on human chromosome 8q24.1: use in refining the location of the trichorhinophalangeal-syndrome and multiple exostoses genes (TRPS1 and EXT1). Genomics 29:87-97, 1995.
[6753] 856. Ludecke, H.-J.; Wagner, M. J.; Nardmann, J.; La Pillo, B.; Parrish, J. E.; Willems, P. J.; Haan, E. A.; Frydman, M.; Hamers, G. J. H.; Wells, D. E.; Horsthemke, B.: Molecular dissection of a contiguous gene syndrome: localization of the genes involved in the Langer-Giedionsyndrome. Hum. Molec. Genet. 4: 31-36, 1995.
[6754] 857. Raskind, W. H.; Conrad, E. U., III; Matsushita, M.; Wijsman, E. M.; Wells, D. E.; Chapman, N.; Sandell, L. J.; Wagner, M.; Houck, J.: Evaluation of locus heterogeneity and EXT1 mutations in 34 families with hereditary multiple exostoses. Hum. Mutat. 11: 231-239, 1998.
[6755] 858. Usala, A.-L.; Madigan, T.; Burguera, B.; Sinha, M. K.; Caro, J. F.; Cunningham, P.; Powell, J. G.; Butler, P. C.: Treatment of insulin-resistant diabetic ketoacidosis with insulin-like growth factor I in an adolescent with insulin-dependent diabetes. New Eng. J. Med. 327: 853-857, 1992.
[6756] 859. Vaessen, N.; Janssen, J. A.; Heutink, P.; Hofman, A.; Lamberts, S. W. J.; Oostra, B. A.; Pols, H. A. P.; van Duijn, C. M.: Association between genetic variation in the gene for insulin-like growth factor-I and low birth weight. Lancet 359: 1036-1037, 2002.
[6757] 860. Van Wyk, J. J.; Svoboda, M. E.; Underwood, L. E.: Evidence from radioligand assays that somatomedin-C and insulin-like growth factor-I are similar to each other and different from other somatomedins. J. Clin. Endocr. Metab. 50: 206-208, 1980.
[6758] 861. Ceccherini, I.; Romei, C.; Barone, V.; Pacini, F.; Martino, E.; Loviselli, A.; Pinchera, A.; Romeo, G.: Identification of the cys634-to-tyr mutation of the RET proto-oncogene in a pedigree with multiple endocrine neoplasia type 2A and localized cutaneous lichen amyloidosis. J. Endocr. Invest. 17: 201-204, 1994.
[6759] 862. Axton, R.; Hanson, I.; Danes, S.; Sellar, G.; van Heyningen, V.; Prosser, J.: The incidence of PAX6 mutation in patients with simple aniridia: an evaluation of mutation detection in 12 cases. J. Med. Genet. 34: 279-286, 1997.
[6760] 863. Beauchamp, G. R.: Anterior segment dysgenesis keratolenticular adhesion and aniridia. J. Pediat. Ophthal. Strabismus 17: 55-58, 1978.
[6761] 864. Crolla, J. A.; Cross, I.; Alkey, N.; Wright, M.; Oley, C. A.: FISH studies in a patient with sporadic aniridia and t(7;11)(q31.2;p13). J. Med. Genet. 33: 66-68, 1996.
[6762] 865. Fantes, J.; Redeker, B.; Breen, M.; Boyle, S.; Brown, J.; Fletcher, J.; Jones, S.; Bickmore, W.; Fukushima, Y.; Mannens, M.; Danes, S.; van Heyningen, V.; Hanson, I.: Aniridia-associated cytogenetic rearrangements suggest that a position effect may cause the mutant phenotype. Hum. Molec. Genet. 4: 415-422, 1995.
[6763] 866. Hiroi, S.; Harada, H.; Nishi, H.; Satoh, M.; Nagai, R.; Kimura, A.: Polymorphisms in the SOD2 and HLA-DRB1 genes are associated with nonfamilial idiopathic dilated cardiomyopathy in Japanese. Biochem. Biophys. Res. Commun. 261: 332-339, 1999.
[6764] 867. Nishi, H.; Koga, Y.; Koyanagi, T.; Harada, H.; Imaizumi, T.; Toshima, H.; Sasazuki, T.; Kimura, A.: DNA typing of HLA class II genes in Japanese patients with dilated cardiomyopathy. J. Molec. Cell. Cardiol. 27:2385-2392, 1995.
[6765] 868. Xie, W.; Barwick, J. L.; Downes, M.; Blumberg, B.; Simon, C. M.; Nelson, M. C.; Neuschwander-Tetri, B. A.; Brunt, E. M.; Guzelian, P. S.; Evans, R. M.: Humanized xenobiotic response in mice expressing nuclear receptor SXR. Nature 406: 435-439, 2000.
[6766] 869. Grundmann, U.; Nerlich, C.; Rein, T.; Zettimeissl, G.: Complete cDNA sequence encoding human beta galactoside alpha-2,6-sialyltransferase. Nucleic Acids Res. 18: 667 only, 1990.
[6767] 870. Wang, X.; Vertino, A.; Eddy, R. L.; Byers, M. G.; Jani-Sait, S. N.; Shows, T. B.; Lau, J. T. Y.: Chromosome mapping and organization of the human beta-galactoside alpha-2,6-sialyltransferase gene: differential and cell-type specific usage of upstream exon sequences in B-lymphoblastoid cells. J. Biol. Chem. 268: 4355-4361, 1993.
[6768] 871. Brown, D.; Zhu, X. L.; Sly, W. S.: Localization of membrane-associated carbonic anhydrase type IV in kidney epithelial cells. Proc. Nat. Acad. Sci. 87: 7457-7461, 1990.
[6769] 872. Fleming, R. E.; Crouch, E. C.; Ruzicka, C. A.; Sly, W. S.: Pulmonary carbonic anhydrase IV: developmental regulation and cell-specific expression in the capillary endothelium. Am. J. Physiol. 265: L627-L635, 1993.
[6770] 873. Fleming, R. E.; Parkkila, S.; Parkkila, A.-K.; Rajaniemi, H.; Waheed, A.; Sly, W. S.: Carbonic anhydrase IV expression in rat and human gastrointestinal tract regional, cellular, and subcellular localization. J. Clin. Invest. 96: 2907-2913, 1995.
[6771] 874. Ghandour, M. S.; Langley, O. K.; Zhu, X. L.; Waheed, A.; Sly, W. S.: Carbonic anhydrase IV on brain capillary endothelial cells: a marker associated with the blood-brain barrier. Proc. Nat. Acad. Sci. 89: 6823-6827, 1992.
[6772] 875. Hageman, G. S.; Zhu, X. L.; Waheed, A.; Sly, W. S.: Localization of carbonic anhydrase IV in a specific capillary bed of the human eye. Proc. Nat. Acad. Sci. 88: 2716-2720, 1991.
[6773] 876. Okuyama, T.; Batanian, J. R.; Sly, W. S.: Genomic organization and localization of gene for human carbonic anhydrase IV to chromosome 17q. Genomics 16: 678-684, 1993.
[6774] 877. Okuyama, T.; Sato, S.; Zhu, X. L.; Waheed, A.; Sly, W. S.: Human carbonic anhydrase IV: cDNA cloning, sequence comparison, and expression in COS cell membranes. Proc. Nat. Acad. Sci. 89: 1315-1319, 1992.
[6775] 878. Sender, S.; Gros, G.; Wahleed, A.; Hageman, G. S.; Sly, W. S.: Immunohistochemical localization of carbonic anhydrase IV in capillaries of rat and human skeletal muscle. J. Histochem. Cytochem. 42: 1229-1236, 1994.
[6776] 879. Wagner, F. F.; Flegel, W. A.: RHD gene deletion occurred in the Rhesus box. Blood 95: 3662-3668, 2000.
[6777] 880. Roychoudhury, A. K.; Nei, M.: Human Polymorphic Genes: World Distribution. New York: Oxford Univ. Press (pub.) 1988.
[6778] 881. Rodriguez de Cordoba, S.; Lublin, D. M.; Rubinstein, P.; Atkinson, J. P.: Human genes for three complement components that regulate the activation of C3 are tightly linked. J. Exp. Med. 161: 1189-1195, 1985.
[6779] 882. Lee, R. T.; Peterson, C. L.; Calman, A. F.; Herskowitz, I.; O'Donnell, J. J.: Cloning of a human galactokinase gene (GK2) on chromosome 15 by complementation in yeast. Proc. Nat. Acad. Sci. 89: 10887-10891, 1992.
[6780] 883. Pastuszak, I.; O'Donnell, J.; Elbein, A. D.: Identification of the GalNAc kinase amino acid sequence. J. Biol. Chem. 271: 23653-23656, 1996.
[6781] 884. Synold, T. W.; Dussault, I.; Forman, B. M.: The orphan nuclear receptor SXR coordinately regulates drug metabolism and efflux. Nature Med. 7: 584-590, 2001.
[6782] 885. Woods, K. A.; Camacho-Hubner, C.; Bergman, R. N.; Barter, D.; Clark, A. J. L.; Savage, M. O.: Effects of insulin-like growth factor I (IGF-I) therapy on body composition and insulin resistance in IGF-I gene deletion. J. Clin. Endocr. Metab. 85: 1407-1411, 2000.
[6783] 886. Woods, K. A.; Camacho-Hubner, C.; Savage, M. O.; Clark, A. J. L.: Intrauterine growth retardation and postnatal growth failure associated with deletion of the insulin-like growth factor I gene. New Eng. J. Med. 335: 1363-1367, 1996.
[6784] 887. Yang-Feng, T. L.; Brissenden, J. E.; Ullrich, A.; Francke, U.: Sub-regional localization of human genes for insulin-like growth factors I (IGF1) and II (IGF2) by in situ hybridization. (Abstract) Cytogenet. Cell Genet. 40: 782 only, 1985.
[6785] 888. Yanovski, J. A.; Sovik, K. N.; Nguyen, T. T.; Sebring, N. G.: Insulin-like growth factors and bone mineral density in African American and white girls. J. Pediat. 137: 826-832, 2000.
[6786] 889. Zhu, J.; Kahn, C. R.: Analysis of a peptide hormone-receptor interaction in the yeast two-hybrid system. Proc. Nat. Acad. Sci. 94:13063-13068, 1997.
[6787] 890. Kobayashi, M.; Takamatsu, K.; Saitoh, S.; Miura, M.; Noguchi, T.: Molecular cloning of hippocalcin, a novel calcium-binding protein of the recover in family exclusively expressed in hippocampus. Biochem. Biophys. Res. Commun. 189: 511-517, 1992.
[6788] 891. Takamatsu, K.; Kobayashi, M.; Saitoh, S.; Fujishiro, M.; Noguchi, T.: Molecular cloning of human hippocalcin cDNA and chromosomal mapping of its gene. Biochem. Biophys. Res. Commun. 200: 606-611, 1994.
[6789] 892. Borrego, S.; Ruiz, A.; Saez, M. E.; Gimm, O.; Gao, X.; Lopez-Alonso, M.; Hernandez, A.; Wright, F. A.; Antinolo, G.; Eng, C.: RET genotypes comprising specific haplotypes of polymorphic variants predispose to isolated Hirsch sprung disease. J. Med. Genet. 37: 572-578, 2000.
[6790] 893. Borrego, S.; Saez, M. E.; Ruiz, A.; Gimm, O.; Lopez-Alonso, M.; Antinolo, G.; Eng, C.: Specific polymorphisms in the RET proto-oncogene are over-represented in patients with Hirsch sprung disease and may represent loci modifying phenotypic expression. J. Med. Genet. 36:771-774, 1999.
[6791] 894. Iwashita, T.; Murakami, H.; Asai, N.; Takahashi, M.: Mechanism of Ret dysfunction by Hirsch sprung mutations affecting its extracellular domain. Hum. Molec. Genet. 5: 1577-1580, 1996.
[6792] 895. Huguet, E. L.; McMahon, J. A.; McMahon, A. P.; Bicknell, R.; Harris, A. L.: Differential expression of human Wnt genes 2, 3, 4, and 7Bin human breast cell lines and normal and disease states of human breast tissue. Cancer Res. 54: 2615-2621, 1994.
[6793] 896. Nusse, R.; Brown, A.; Papkoff, J.; Scambler, P.; Shackleford, G.; McMahon, A.; Moon, R.; Varmus, H.: A new nomenclature for int-1 and related genes: the Wnt gene family. Cell 64: 231-232, 1991.
[6794] 897. Yamauchi, M.; Yamauchi, N.; Phear, G.; Spurr, N. K.; Martinsson, T.; Weith, A.; Meuth, M.: Genomic organization and chromosomal localization of the human CTP synthetase gene (CTPS). Genomics 11: 1088-1096, 1991.
[6795] 898. Courseaux, A.; Grosgeorge, J.; Gaudray, P.; Pannett, A. A. J.; Forbes, S. A.; Williamson, C.; Bassett, D.; Thakker, R. V.; Teh, B. T.; Farnebo, F.; Shepherd, J.; Skogseid, B.; Larsson, C.; Giraud, S.; Zhang, C. X.; Salandre, J.; Calender, A.: Definition of the minimal MEN1 candidate area based on a 5-Mb integrated map of proximal 11q13. Genomics 37:354-365, 1996.
[6796] 899. Dickson, K. M.; Bergeron, J. J. M.; Shames, I.; Colby, J.; Nguyen, D. T.; Chevet, E.; Thomas, D. Y.; Snipes, G. J.: Association of calnexin with mutant peripheral myelin protein-22 ex vivo: a basis for ‘gain-of-function’ ER diseases. Proc. Nat. Acad. Sci. 99: 9852-9857, 2002.
[6797] 900. Gray, P. W.; Byers, M. G.; Eddy, R. L.; Shows, T. B.: The assignment of the calnexin gene to the q35 region of chromosome 5. (Abstract) Human Genome Mapping Workshop 93 9 only, 1993.
[6798] 901. Schrag, J. D.; Bergeron, J. J. M.; Li, Y.; Borisova, S.; Hahn, M.; Thomas, D. Y.; Cygler, M.: The structure of calnexin, an ER chaperone involved in quality control of protein folding. Molec. Cell 8: 633-644, 2001.
[6799] 902. Tjoelker, L. W.; Seyfried, C. E.; Eddy, R. L., Jr.; Byers, M. G.; Shows, T. B.; Calderon, J.; Schreiber, R. B.; Gray, P. W.: Human, mouse, and rat calnexin cDNA cloning: identification of potential calcium binding motifs and gene localization to human chromosome 5. Biochemistry 33:3229-3236, 1994.
[6800] 903. Cyr, C.; Huebner, K.; Druck, T.; Kris, R.: Cloning and chromosomal localization of a human endothelin ETA receptor. Biochem. Biophys. Res. Commun. 181: 184-190, 1991.
[6801] 904. Hosoda, K.; Nakao, K.; Tamura, N.; Arai, H.; Ogawa, Y.; Suga, S.; Nakanishi, S.; Imura, H.: Organization, structure, chromosomal assignment, and expression of the gene encoding the human endothelin-A receptor. J. Biol. Chem. 267: 18797-18804, 1992.
[6802] 905. Tzourio, C.; El Amrani, M.; Poirier, O.; Nicaud, V.; Bousser, M.-G.; Alperovitch, A.: Association between migraine and endothelin type A receptor (ETA-231 A/G) gene polymorphism. Neurology 56: 1273-1277, 2001.
[6803] 906. Carrasquillo, M. M.; McCallion, A. S.; Puffenberger, E. G.; Kashuk, C. S.; Nouri, N.; Chakravarti, A.: Genome-wide association study and mouse model identify interaction between RET and EDNRB pathway sin Hirsch sprung disease. Nature Genet. 32: 237-244, 2002.
[6804] 907. Denker, S. P.; Huang, D. C.; Orlowski, J.; Furthmayr, H.; Barber, D. L.: Direct binding of the Na—H exchanger NHE1 to ERM proteins regulates the cortical cytoskeleton and cell shape independently of H(+) translocation. Molec. Cell 6: 1425-1436, 2000.
[6805] 908. Dudley, C. R. K.; Giuffra, L. A.; Tippett, P.; Kidd, K. K.; Reeders, S. T.: The Na+/H+ antiporter: a ‘melt’ polymorphism allows regional mapping to the short arm of chromosome 1. Hum. Genet. 86: 79-83, 1990.
[6806] 909. Franchi, A.; Perucca-Lostanlen, D.; Pouyssegur, J.: Functional expression of a human Na+/H+ antiporter gene transfected into antiporter-deficient mouse L cells. Proc. Nat. Acad. Sci. 83: 9388-9392, 1986.
[6807] 910. Lifton, R. P.; Sardet, C.; Pouyssegur, J.; Lalouel, J.-M.: Cloning of the human genomic amiloride-sensitive Na+/H+ antiporter gene, identification of genetic polymorphisms, and localization on the genetic map of chromosome 1p. Genomics 7: 131-135, 1990.
[6808] 911. Mattei, M.-G.; Galloni, M.; Sardet, C.; Franchi, A.; Counillon, L.; Passage, E.; Pouyssegur, J.: Localization of the antiporter gene (APNH) and chromosomal homology between human 1p, mouse 4 and Chinese hamster 2q. (Abstract) Cytogenet. Cell Genet. 51: 1041, 1989.
[6809] 912. Mattei, M.-G.; Sardet, C.; Franchi, A.; Pouyssegur, J.: Chromosomal mapping of the amiloride-sensitive Na+/H+ antiporter gene. (Abstract) Cytogenet. Cell Genet. 46: 658-659, 1987.
[6810] 913. Mattei, M.-G.; Sardet, C.; Franchi, A.; Pouyssegur, J.: The human amiloride-sensitive Na+/H+ antiporter: localization to chromosome 1 by in situ hybridization. Cytogenet. Cell Genet. 48: 6-8, 1988.
[6811] 914. Mendoza, S. A.: The Na+/H+ antiport is a mediator of cell proliferation. Acta Paediat. Scand. 76: 545-547, 1987.
[6812] 915. Morahan, G.; Rakar, S.: Localization of the mouse Na+/H+ exchanger gene on distal chromosome 4. Genomics 15: 231-232, 1993.
[6813] 916. Sardet, C.; Franchi, A.; Pouyssegur, J.: Molecular cloning, primary structure, and expression of the human growth factor-activatable Na(+)/H(+)antiporter. Cell 56: 271-280, 1989.
[6814] 917. Whitney, P. L.; Briggle, T. V.: Membrane-associated carbonic an hydrase purified from bovine lung. J. Biol. Chem. 257: 12056-12059, 1982.
[6815] 918. Zhu, X. L.; Sly, W. S.: Carbonic anhydrase IV from human lung: purification, characterization, and comparison with membrane carbonican hydrase from human kidney. J. Biol. Chem. 265: 8795-8801, 1990.
[6816] 919. Iwata, N.; Tsubuki, S.; Takaki, Y.; Shirotani, K.; Lu, B.; Gerard, N. P.; Gerard, C.; Hama, E.; Lee, H.-J.; Saido, T. C.: Metabolic regulation of brain A-beta by neprilysin. Science 292: 1550-1552, 2001.
[6817] 920. McGeer, P. L.; McGeer, E. G.: Polymorphisms in inflammatory genes and the risk of Alzheimer disease. Arch. Neurol. 58: 1790-1792, 2001.
[6818] 921. Modi, W. S.; Masuda, A.; Yamada, M.; Oppenheim, J. J.; Matsushima, K.; O'Brien, S. J.: Chromosomal localization of the human interleukin 1 alpha (IL-1-alpha) gene. Genomics 2: 310-314, 1988.
[6819] 922. Mosley, B.; Urdal, D. L.; Prickett, K. S.; Larsen, A.; Cosman, D.; Conlon, P. J.; Gillis, S.; Dower, S. K.: The interleukin-1 receptor binds the human interleukin-1-alpha precursor but not the interleukin-1-beta precursor. J. Biol. Chem. 262: 2941-2944, 1987.
[6820] 923. Bailly, S.; di Giovine, F. S.; Blakemore, A. I. F.; Duff, G. W.: Genetic polymorphism of human interleukin-1-alpha. Europ. J. Immun. 23:1240-1245, 1993.
[6821] 924. Boultwood, J.; Breckon, G.; Birch, D.; Cox, R.: Chromosomal localization of murine interleukin-1 alpha and beta genes. Genomics 5: 481-485, 1989.
[6822] 925. Cox, A.; Camp, N. J.; Cannings, C.; di Giovine, F. S.; Dale, M.; Worthington, J.; John, S.; Ollier, W. E. R.; Silman, A. J.; Duff, G. W.: Combined sib-TDT and TDT provide evidence for linkage of the interleukin-1 gene cluster to erosive rheumatoid arthritis. Hum. Molec. Genet. 8: 1707-1713, 1999.
[6823] 926. Cox, A.; Camp, N. J.; Nicklin, M. J. H.; di Giovine, F. S.; Duff, G. W.: An analysis of linkage disequilibrium in the interleukin-1 gene cluster, using a novel grouping method for multiallelic markers. Am. J. Hum. Genet. 62: 1180-1188, 1998.
[6824] 927. Diehl, S. R.; Wang, Y.; Brooks, C. N.; Burmeister, J. A.; Califano, J. V.; Wang, S.; Schenkein, H. A.: Linkage disequilibrium of interleukin-1 genetic polymorphisms with early-onset periodontitis. J. Periodont. 70:418-430, 1999.
[6825] 928. Du, Y.; Dodel, R. C.; Eastwood, B. J.; Bales, K. R.; Gao, F.; Lohmuller, F.; Muller, U.; Kurz, A.; Zimmer, R.; Evans, R. M.; Hake, A.; Gasser, T.; Oertel, W. H.; Griffin, W. S. T.; Paul, S. M.; Farlow, M. R.: Association of an interleukin 1-alpha polymorphism with Alzheimer's disease. Neurology 55: 480-484, 2000.
[6826] 929. Furutani, Y.; Notake, M.; Fukui, T.; Ohue, M.; Nomura, H.; Yamada, M.; Nakamura, S.: Complete nucleotide sequence of the gene for human interleukin 1 alpha. Nucleic Acids Res. 14: 3167-3179, 1986.
[6827] 930. Gray, P. W.; Glaister, D.; Chen, E.; Goeddel, D. V.; Pennica, D.: Two interleukin 1 genes in the mouse: cloning and expression of the cDNA for murine interleukin 1-beta. J. Immun. 137: 3644-3648, 1986.
[6828] 931. Grimaldi, L. M. E.; Casadei, V. M.; Ferri, C.; Veglia, F.; Licastro, F.; Annoni, G.; Biunno, I.; De Bellis, G.; Sorbi, S.; Mariani, C.; Canal, N.; Griffin, W. S. T.: Association of early-onset Alzheimer's disease with an interleukin-1-alpha gene polymorphism. Ann. Neurol. 47:361-365, 2000.
[6829] 932. Hogquist, K. A.; Nett, M. A.; Unanue, E. R.; Chaplin, D. D.: Interleukin 1 is processed and released during apoptosis. Proc. Nat. Acad. Sci. 88: 8485-8489, 1991.
[6830] 933. Hurwitz, A.; Loukides, J.; Ricciarelli, E.; Botero, L.; Katz, E.; McAllister, J. M.; Garcia, J. E.; Rohan, R.; Adashi, E. Y.; Hernandez, E. R.: Human intraovarian interleukin-1 (IL-1) system: highly compartmentalized and hormonally dependent regulation of the genes encoding IL-1, its receptor, and its receptor antagonist. J. Clin. Invest. 89: 1746-1754, 1992.
[6831] 934. Ki, C.-S.; Na, D. L.; Kim, D. K.; Kim, H. J.; Kim, J.-W.: Lack of association of the interleukin-1-alpha gene polymorphism with Alzheimer's disease in a Korean population. (Letter) Ann. Neurol. 49: 817-818, 2001.
[6832] 935. Kolsch, H.; Ptok, U.; Bagli, M.; Papassotiropoulos, A.; Schmitz, S.; Barkow, K.; Kockler, M.; Rao, M. L.; Maier, W.; Heun, R.: Genepoly morphisms of interleukin-1-alpha influence the course of Alzheimer's disease. (Letter) Ann. Neurol. 49: 818-819, 2001.
[6833] 936. Kornman, K. S.; Crane, A.; Wang, H.-Y.; di Giovine, F. S.; Newman, M. G.; Pirk, F. W.; Wilson, T. G., Jr.; Higginbottom, F. L.; Duff, G. W.: The interleukin-1 genotype as a severity factor in adult periodontal disease. J. Clin. Periodont. 24: 72-77, 1997.
[6834] 937. Lafage, M.; Maroc, N.; Dubreuil, P.; de Waal Malefijt, R.; Pebusque, M.-J.; Carcassonne, Y.; Mannoni, P.: The human interleukin-1-alpha gene is located on the long arm of chromosome 2 at band q13. Blood 73:104-107, 1989.
[6835] 938. Lord, P. C. W.; Wilmoth, L. M. G.; Mizel, S. B.; McCall, C. E.: Expression of interleukin-1 alpha and beta genes by human blood polymorphonuclear leukocytes. J. Clin. Invest. 87: 1312-1321, 1991.
[6836] 939. Murphy, G. M., Jr.; Claassen, J. D.; DeVoss, J. J.; Pascoe, N.; Taylor, J.; Tinklenberg, J. R.; Yesavage, J. A.: Rate of cognitive decline in AD is accelerated by the interleukin-1-alpha-889*1 allele. Neurology 56:1595-1597, 2001.
[6837] 940. Motyckova, G.; Weilbaecher, K. N.; Horstmann, M.; Rieman, D. J.; Fisher, D. Z.; Fisher, D. E.: Linking osteopetrosis and pycnodysostosis: regulation of cathepsin K expression by the microphthalmia transcription factor family. Proc. Nat. Acad. Sci. 98: 5798-5803, 2001.
[6838] 941. Guillon, H.; de Massy, B.: An initiation site for meiotic crossing-over and gene conversion in the mouse. Nature Genet. 32: 296-299, 2002.
[6839] 942. Parolini, S.; Bottino, C.; Falco, M.; Augugliaro, R.; Giliani, S.; Franceschini, R.; Ochs, H. D.; Wolf, H.; Bonnefoy, J.-Y.; Biassoni, R.; Moretta, L.; Notarangelo, L. D.; Moretta, A.: X-linked lymphoproliferative disease: 2B4 molecules displaying inhibitory rather than activating function are responsible for the inability of natural killer cells to kill Epstein-Barr virus-infected cells. J. Exp. Med. 192: 337-346, 2000.
[6840] 943. McPherron, A. C.; Lee, S.-J.: Suppression of body fat accumulation in myostatin-deficient mice. J. Clin. Invest. 109: 595-601, 2002.
[6841] 944. Attisano, L.; Carcamo, J.; Ventura, F.; Weis, F. M. B.; Massague, J.; Wrana, J. L.: Identification of human activin and TGF-beta type I receptors that form heteromeric kinase complexes with type II receptors. Cell 75:671-680, 1993.
[6842] 945. Mathews, L. S.; Vale, W. W.: Expression cloning of an activin receptor, a predicted transmembrane serine kinase. Cell 65: 973-982, 1991.
[6843] 946. Matsuzaki, K.; Xu, J.; Wang, F.; McKeehan, W. L.; Krummen, L.; Kan, M.: A widely expressed transmembrane serine/threonine kinase that does not bind activin, inhibin, transforming growth factor beta, or bone morphogenic factor. J. Biol. Chem. 268: 12719-12723, 1993.
[6844] 947. Roijer, E.; Miyazono, K.; Astrom, A.-K.; Geurts van Kessel, A.; ten Dijke, P.; Stenman, G.: Chromosomal localization of three human genes encoding members of the TGF-beta superfamily of type I serine/threonine kinase receptors. Mammalian Genome 9: 266-268, 1998.
[6845] 948. ten Dijke, P.; Ichijo, H.; Franzen, P.; Schulz, P.; Saras, J.; Toyoshima, H.; Heldin, C.-H.; Miyazono, K.: Activin receptor-like kinases: a novel subclass of cell-surface receptors with predicted serine/threonine kinase activity. Oncogene 8: 2879-2887, 1993.
[6846] 949. Ferguson-Smith, A. C.; Cattanach, B. M.; Barton, S. C.; Beechey, C. V.; Surani, M. A.: Embryological and molecular investigations of parental imprinting on mouse chromosome 7. Nature 351: 667-670, 1991.
[6847] 950. Chang, T.-M.; Neville, D. M., Jr.: Demonstration of diphtheria toxin receptors on surface membranes from both toxin-sensitive and toxin-resistant species. J. Biol. Chem. 253: 6866-6871, 1978.
[6848] 951. Creagan, R. P.; Chen, S.-H.; Ruddle, F. H.: Genetic analysis of the cell surface: association of human chromosome 5 with sensitivity to diphtheria toxin in mouse-human somatic cell hybrids. Proc. Nat. Acad. Sci. 72: 2237-2241, 1975.
[6849] 952. Fen, Z.; Dhadly, M. S.; Yoshizumi, M.; Hilkert, R. J.; Quertermous, T.; Eddy, R. L.; Shows, T. B.; Lee, M.-E.: Structural organization and chromosomal assignment of the gene encoding the human heparin-binding epidermal growth factor-like growth factor/diphtheria toxin receptor. Biochemistry 32:7932-7938, 1993.
[6850] 953. George, D. L.; Francke, U.: Regional mapping of human genes for hexosaminidase B and diphtheria toxin sensitivity on chromosome 5 using mouse X human hybrid cells. Somat. Cell Genet. 3: 629-638, 1977.
[6851] 954. Gupta, R. S.; Siminovitch, L.: Isolation and characterization of mutants of human diploid fibroblasts resistant to diphtheria toxin. Proc. Nat. Acad. Sci. 75: 3337-3340, 1978.
[6852] 955. Hayes, H.; Kaneda, Y.; Uchida, T.; Okada, Y.: Regional assignment of the gene for diphtheria toxin sensitivity using subchromosomal fragments in microcell hybrids. Chromosoma 96: 26-32, 1987.
[6853] 956. Higashiyama, S.; Abraham, J. A.; Miller, J.; Fiddes, J. C.; Klagsbrun, M.: A heparin-binding growth factor secreted by macrophage-like cells that is related to EGF. Science 251: 936-939, 1991.
[6854] 957. Demetrick, D. J.; Matsumoto, S.; Hannon, G. J.; Okamoto, K.; Xiong, Y.; Zhang, H.; Beach, D. H.: Chromosomal mapping of the genes for the human cell cycle proteins cyclin C (CCNC), cyclin E (CCNE), p21(CDKN1) and KAP (CDKN3). Cytogenet. Cell Genet. 69: 190-192, 1995.
[6855] 958. Buonavista, N.; Balzano, C.; Pontarotti, P.; Le Paslier, D.; Golstein, P.: Molecular linkage of the human CTLA4 and CD28 Ig-superfamily genes in yeast artificial chromosomes. Genomics 13: 856-861, 1992.
[6856] 959. Howard, T. A.; Rochelle, J. M.; Seldin, M. F.: Cd28 and Ctla-4, two related members of the Ig super gene family, are tightly linked on proximal mouse chromosome 1. Immunogenetics 33: 74-76, 1991.
[6857] 960. Gallagher, P. G.; Forget, B. G.: Structure, organization, and expression of the band 7.2b gene, a candidate gene for hereditary hydrocytosis. J. Biol. Chem. 270: 26358-26363, 1995.
[6858] 961. Gallagher, P. G.; Romana, M.; Lieman, J. H.; Ward, D. C.: cDNA structure, tissue-specific expression, and chromosomal localization of the murine band 7.2b gene. Blood 86: 359-365, 1995.
[6859] 962. Gallagher, P. G.; Upender, M.; Ward, D. C.; Forget, B. G.: The gene for human erythrocyte membrane protein band 7.2 (EPB72) maps to 9q33-q34 centromeric to the Philadelphia chromosome translocation breakpoint region. Genomics 18: 167-169, 1993.
[6860] 963. Hiebl-Dirschmied, C. M.; Entler, B.; Glotzmann, C.; Maurer-Fogy, I.; Stratowa, C.; Prohaska, R.: Cloning and nucleotide sequence of cDNA encoding human erythrocyte band 7 integral membrane protein. Biochim. Biophys. Acta 1090: 123-124, 1991.
[6861] 964. Pilz, A.; Prohaska, R.; Peters, J.; Abbott, C.: Genetic linkage analysis of the Ak1, Col5a1, Epb7.2, Fpgs, Grp78, Pbx3, and Notch1 genes in the region of mouse chromosome 2 homologous to human chromosome 9q. Genomics 21: 104-109, 1994.
[6862] 965. Unfried, I.; Entler, B.; Prohaska, R.: The organization of the gene (EPB72) encoding the human erythrocyte band 7 integral membrane protein (protein 7.2b). Genomics 30: 521-528, 1995.
[6863] 966. Westberg, J. A.; Entler, B.; Prohaska, R.; Schroder, J. P.: The gene coding for erythrocyte protein band 7.2b (EPB72) is located in band q34.1 of human chromosome 9. Cytogenet. Cell Genet. 63: 241-243, 1993.
[6864] 967. Zhu, Y.; Paszty, C.; Turetsky, T.; Tsai, S.; Kuypers, F. A.; Lee, G.; Cooper, P.; Gallagher, P. G.; Stevens, M. E.; Rubin, E.; Mohandas, N.; Mentzer, W. C.: Stomatocytosis is absent in ‘stomatin’-deficient murine red blood cells. Blood 93: 2404-2410, 1999.
[6865] 968. Lacy, S. E.; Bonnemann, C. G.; Buzney, E. A.; Kunkel, L. M.: Identification of FLRT1, FLRT2, and FLRT3: a novel family of transmembrane leucine-rich repeat proteins. Genomics 62: 417-426, 1999.
[6866] 969. Horikoshi, N.; Cong, J.; Kley, N.; Shenk, T.: Isolation of differentially expressed cDNAs from p53-dependent apoptotic cells: activation of the human homologue of the Drosophila peroxidasin gene. Biochem. Biophys. Res. Commun. 261: 864-869, 1999.
[6867] 970. Weiler, S. R.; Taylor, S. M.; Deans, R. J.; Kan-Mitchell, J.; Mitchell, M. S.; Trent, J. M.: Assignment of a human melanoma associated gene MG50 (D2S448) to chromosome 2p25.3 by fluorescence in situ hybridization. Genomics 22:243-244, 1994.
[6868] 971. Betz, R.; Gray, S. G.; Ekstrom, C.; Larsson, C.; Ekstrom, T. J.: Human histone deacetylase 2, HDAC2 (human RPD3), is localized to 6q21 by radiation hybrid mapping. Genomics 52: 245-246, 1998.
[6869] 972. Inouye, C. J.; Seto, E.: Relief of YY1-induced transcriptional repression by protein-protein interaction with the nuclear phosphoprotein B23. J. Biol. Chem. 269: 6506-6510, 1994.
[6870] 973. Randhawa, G. S.; Bell, D. W.; Testa, J. R.; Feinberg, A. P.: Identification and mapping of human histone acetylation modifier gene homologues. Genomics 51:262-269, 1998.
[6871] 974. Yang, W.-M.; Inouye, C.; Zeng, Y.; Bearss, D.; Seto, E.: Transcriptional repression by YY1 is mediated by interaction with a mammalian homolog of the yeast global regulator RPD3. Proc. Nat. Acad. Sci. 93: 12845-12850, 1996.
[6872] 975. Yarden, R. I.; Brody, L. C.: BRCA1 interacts with components of the histone deacetylase complex. Proc. Nat. Acad. Sci. 96: 4983-4988, 1999.
[6873] 976. Dermaut, B.; Theuns, J.; Sleegers, K.; Hasegawa, H.; Van den Broeck, M.; Vennekens, K.; Corsmit, E.; St. George-Hyslop, P.; Cruts, M.; van Duijn, C. M.; Van Broeckhoven, C.: The gene encoding nicastrin, a major gamma-secretase component, modifies risk for familial early-onset Alzheimer disease in a Dutch population-based sample. Am. J. Hum. Genet. 70: 1568-1574, 2002.
[6874] 977. Feldman, R. G.; Chandler, K. A.; Levy, L. L.; Glaser, G. H.: Familial Alzheimer's disease. Neurology 13: 811-824, 1963.
[6875] 978. Foncin, J.-F.; Salmon, D.; Supino-Viterbo, V.; Feldman, R. G.; Macchi, G.; Mariotti, P.; Scoppetta, C.; Caruso, G.; Bruni, A. C.: Demence presenile d'Alzheimer transmise dans une famille etendue. Rev. Neurol. (Paris) 141: 194-202, 1985.
[6876] 979. Hiltunen, M.; Mannermaa, A.; Thompson, D.; Easton, D.; Pirskanen, M.; Helisalmi, S.; Koivisto, A. M.; Lehtovirta, M.; Ryynanen, M.; Soininen, H.: Genome-wide linkage disequilibrium mapping of late-onset Alzheimer's disease in Finland. Neurology 57: 1663-1668, 2001.
[6877] 980. Kehoe, P.; Wavrant-De Vrieze, F.; Crook, R.; Wu, W. S.; Holmans, P.; Fenton, I.; Spurlock, G.; Norton, N.; Williams, H.; Williams, N.; Lovestone, S.; Perez-Tur, J.; Hutton, J.; and 10 others: A full genome scan for late onset Alzheimer disease. Hum. Molec. Genet. 8:237-245, 1999.
[6878] 981. Kopan, R.; Goate, A.: Aph-2/nicastrin: an essential component of gamma-secretase and regulator of Notch signaling and presenilin localization. Neuron 33: 321-324, 2002.
[6879] 982. Yu, G.; Nishimura, M.; Arawaka, S.; Levitan, D.; Zhang, L.; Tandon, A.; Song, Y.-Q.; Rogaeva, E.; Chen, F.; Kawarai, T.; Supala, A.; Levesque, L.; and 18 others: Nicastrin modulates presenilin-mediated notch/glp-1 signal transduction and beta-APP processing. Nature 407: 48-54, 2000.
[6880] 983. Zubenko, G. S.; Hughes, H. B.; Stiffler, J. S.; Hurtt, M. R.; Kaplan, B. B.: A genome survey for novel Alzheimer disease risk loci: result sat 10-cM resolution. Genomics 50: 121-128, 1998.
[6881] 984. Arakawa, H.; Hauschild, J.; Buerstedde, J.-M.: Requirement of the activation-induced deaminase (AID) gene for immunoglobulin gene conversion. Science 295: 1301-1306, 2002.
[6882] 985. Fagarasan, S.; Kinoshita, K.; Muramatsu, M.; Ikuta, K.; Honjo, T.: In situ class switching and differentiation to IgA producing cells in the gut lamina propria. Nature 413: 639-643, 2001.
[6883] 986. Muramatsu, M.; Kinoshita, K.; Fagarasan, S.; Yamada, S.; Shinkai, Y.; Honjo, T.: Class switch recombination and hypermutation require activation-induced cytidine deaminase (AID), a potential RNA editing enzyme. Cell 102: 553-563, 2000.
[6884] 987. Muramatsu, M.; Sankaranand, V. S.; Anant, S.; Sugai, M.; Kinoshita, K.; Davidson, N. O.; Honjo, T.: Specific expression of activation-induced cytidine deaminase (AID), a novel member of the RNA-editing deaminase family in germinal center B cells. J. Biol. Chem. 274: 18470-18476, 1999.
[6885] 988. Bak, M.; Hansen, C.; Henriksen, K. F.; Tommerup, N.: The human hedgehog-interacting protein gene: structure and chromosome mapping to 4q31.21-q31.3. Cytogenet. Cell Genet. 92: 300-303, 2001.
[6886] 989. Chuang, P.-T.; McMahon, A. P.: Vertebrate hedgehog signalling modulated by induction of a hedgehog-binding protein. Nature 397:617-621, 1999.
[6887] 990. Nakagawa, T.; Setou, M.; Seog, D.-H.; Ogasawara, K.; Dohmae, N.; Takio, K.; Hirokawa, N.: A novel motor, KIF13A, transports mannose-6-phosphate receptor to plasma membrane through direct interaction with AP-1 complex. Cell 103:569-581, 2000.
[6888] 991. Scott, A. F.: Personal Communication. Baltimore, Md. Nov. 29, 2000.
[6889] 992. Blumberg, H.; Conklin, D.; Xu, W.; Grossmann, A.; Brender, T.; Carollo, S.; Eagan, M.; Foster, D.; Haldeman, B. A.; Hammond, A.; Haugen, H.; Jelinek, L.; and 14 others: Interleukin 20: discovery, receptor identification, and role in epidermal function. Cell 104:9-19, 2001.
[6890] 993. Armstrong, E.; Partanen, J.; Cannizzaro, L.; Huebner, K.; Alitalo, K.: Localization of the fibroblast growth factor receptor-4 gene to chromosome region 5q33-qter. Genes Chromosomes Cancer 4: 94-98, 1992.
[6891] 994. Bange, J.; Prechtl, D.; Cheburkin, Y.; Specht, K.; Harbeck, N.; Schmitt, M.; Knyazeva, T.; Muller, S.; Gartner, S.; Sures, I.; Wang, H.; Imyanitov, E.; Haring, H.-U.; Knayzev, P.; Iacobelli, S.; Hofler, H.; Ullrich, A.: Cancer progression and tumor cell motility are associated with the FGFR4 Arg388 allele. Cancer Res. 62: 840-847, 2002.
[6892] 995. Holtrich, U.; Brauninger, A.; Strebhardt, K.; Rubsamen-Waigmann, H.: Two additional protein-tyrosine kinases expressed in human lung: fourth member of the fibroblast growth factor receptor family and an intracellular protein-tyrosine kinase. Proc. Nat. Acad. Sci. 88:10411-10415, 1991.
[6893] 996. Kostrzewa, M.; Muller, U.: Genomic structure and complete sequence of the human FGFR4 gene. Mammalian Genome 9: 131-135, 1998.
[6894] 997. Partanen, J.; Makela, T. P.; Eerola, E.; Korhonen, J.; Hirvonen, H.; Claesson-Welsh, L.; Alitalo, K.: FGFR-4, a novel acidic fibroblast growth factor receptor with a distinct expression pattern. EMBO J. 10:1347-1354, 1991.
[6895] 998. Scott, A. F.: Personal Communication. Baltimore, Md. Oct. 12, 1999.
[6896] 999. Vainikka, S.; Partanen, J.; Bellosta, P.; Coulier, F.; Basilico, C.; Jaye, M.; Alitalo, K.: Fibroblast growth factor receptor-4 shows novel features in genomic structure, ligand binding and signal transduction. EMBO J. 11: 4273-4280, 1992.
[6897] 1000. Warrington, J. A.; Bailey, S. K.; Armstrong, E.; Aprelikova, O.; Alitalo, K.; Dolganov, G. M.; Wilcox, A. S.; Sikela, J. M.; Wolfe, S. F.; Lovett, M.; Wasmuth, J. J.: A radiation hybrid map of 18 growth factor, growth factor receptor, hormone receptor, or neurotransmitter receptor genes on the distal region of the long arm of chromosomes. Genomics 13: 803-808, 1992.
[6898] 1001. Ogihara, T.; Isobe, T.; Ichimura, T.; Taoka, M.; Funaki, M.; Sakoda, H.; Onishi, Y.; Inukai, K.; Anai, M.; Fukushima, Y.; Kikuchi, M.; Yazaki, Y.; Oka, Y.; Asano, T.: 14-3-3 protein binds to insulin receptor substrate-1, one of the binding sites of which is in the phosphotyrosine binding domain. J. Biol. Chem. 272: 25267-25274, 1997.
[6899] 1002. Kumar, S.; McDonnell, P. C.; Lehr, R.; Tierney, L.; Tzimas, M. N.; Griswold, D. E.; Capper, E. A.; Tal-Singer, R.; Wells, G. I.; Doyle, M. L.; Young, P. R.: Identification and initial characterization of four novel members of the interleukin-1 family. J. Biol. Chem. 275:10308-10314, 2000.
[6900] 1003. Torrents, D.; Estevez, R.; Pineda, M.; Fernandez, E.; Lloberas, J.; Shi, Y.-B.; Zorzano, A.; Palacin, M.: Identification and characterization of a membrane protein (y(+)L amino acid transporter-1) that associates with 4F2hc to encode the amino acid transport activity y(+)L: a candidate gene for lysinuric protein intolerance. J. Biol. Chem. 273: 32437-32445, 1998.
[6901] 1004. Cohen-Salmon, M.; Frenz, D.; Liu, W.; Verpy, E.; Voegeling, S.; Petit, C.: Fdp, a new fibrocyte-derived protein related to MIA/CD-RAP, has an in vitro effect on the early differentiation of the inner ear mesenchyme. J. Biol. Chem. 275: 40036-40041, 2000.
[6902] 1005. Rendtorff, N. D.; Frodin, M.; Attie-Bitach, T.; Vekemans, M.; Tommerup, N.: Identification and characterization of an inner ear-expressed human melanoma inhibitory activity (MIA)-like gene (MIAL) with a frequent-polymorphism that abolishes translation. Genomics 71: 40-52, 2001.
[6903] 1006. Robertson, N. G.; Heller, S.; Lin, J. S.; Resendes, B. L.; Weremowicz, S.; Denis, C. S.; Bell, A. M.; Hudspeth, A. J.; Morton, C. C.: A novel conserved cochlear gene, OTOR: identification, expression analysis, and chromosomal mapping. Genomics 66: 242-248, 2000.
[6904] 1007. Busfield, S. J.; Comrack, C. A.; Yu, G.; Chickering, T. W.; Smutko, J. S.; Zhou, H.; Leiby, K. R.; Holmgren, L. M.; Gearing, D. P.; Pan, Y.: Identification and gene organization of three novel members of the IL-1 family on human chromosome 2. Genomics 66: 213-216, 2000.
[6905] 1008. Matsuyoshi, N.; Tanaka, T.; Toda, K.; Imamura, S.: Identification of novel cadherins expressed in human melanoma cells. J. Invest. Derm. 108: 908-913, 1997.
[6906] 1009. Li, Y.; Chin, L.-S.; Weigel, C.; Li, L.: Spring, a novel RING finger protein that regulates synaptic vesicle exocytosis. J. Biol. Chem. 276: 40824-40833, 2001.
[6907] 1010. Reymond, A.; Meroni, G.; Fantozzi, A.; Merla, G.; Cairo, S.; Luzi, L.; Riganelli, D.; Zanaria, E.; Messali, S.; Cainarca, S.; Guffanti, A.; Minucci, S.; Pelicci, P. G.; Ballabio, A.: The tripartite motif family identifies cell compartments. EMBO J. 20: 2140-2151, 2001.
[6908] 1011. Scardigli, R.; Schuurmans, C.; Gradwohl, G.; Guillemot, F.: Cross regulation between neurogenin 2 and pathways specifying neuronal identity in the spinal cord. Neuron 31: 203-217, 2001.
[6909] 1012. Habas, R.; Kato, Y.; He, X.: Wnt/Frizzled activation of Rho regulates vertebrate gastrulation and requires a novel Form in homology protein Daaml. Cell 107: 843-854, 2001.
[6910] 1013. Bradley, K. A.; Mogridge, J.; Mourez, M.; Collier, R. J.; Young, J. A. T.: Identification of the cellular receptor for anthrax toxin. Nature 414:160-161, 2001.
[6911] 1014. Hammarsund, M.; Wilson, W.; Corcoran, M.; Merup, M.; Einhorn, S.; Grander, D.; Sangfelt, O.: Identification and characterization of two novel human mitochondrial elongation factor genes, hEFG2 and hEFG1, phylogenetically conserved through evolution. Hum. Genet. 109: 542-550, 2001.
[6912] 1015. Ishii, H.; Vecchione, A.; Murakumo, Y.; Baldassarre, G.; Numata, S.; Trapasso, F.; Alder, H.; Baffa, R.; Croce, C. M.: FEZ1/LZTS1 gene at 8p22 suppresses cancer cell growth and regulates mitosis. Proc. Nat. Acad. Sci. 98: 10374-10379, 2001.
[6913] 1016. Bruick, R. K.; McKnight, S. L.: A conserved family of prolyl-4-hydroxylases that modify HIF. Science 294: 1337-1340, 2001.
[6914] 1017. Epstein, A. C. R.; Gleadle, J. M.; McNeill, L. A.; Hewitson, K. S.; O'Rourke, J.; Mole, D. R.; Mukherji, M.; Metzen, E.; Wilson, M. I.; Dhanda, A.; Tian, Y.-M.; Masson, N.; Hamilton, D. L.; Jaakkola, P.; Barstead, R.; Hodgkin, J.; Maxwell, P. H.; Pugh, C. W.; Schofield, C. J.; Ratcliffe, P. J.: C. elegans EGL-9 and mammalian homologs define a family of dioxygenases that regulate HIF by prolyl hydroxylation. Cell 107:43-54, 2001.
[6915] 1018. Bleul, C. C.; Farzan, M.; Choe, H.; Parolin, C.; Clark-Lewis, I.; Sodroski, J.; Springer, T. A.: The lymphocyte chemoattractant SDF-1 is a ligand for LESTR/fusin and blocks HIV-1 entry. Nature 382:829-833, 1996.
[6916] 1019. Caruz, A.; Samsom, M.; Alonso, J. M.; Alcami, J.; Baleux, F.; Virelizier, J. L.; Parmentier, M.; Arenzana-Seisdedos, F.: Genomic organization and promoter characterization of human CXCR4 gene. FEBS Lett. 426:271-278, 1998.
[6917] 1020. Clapham, P. R.; Blanc, D.; Weiss, R. A.: Specific cell surface requirements for the infection of CD4-positive cells by human immunodeficiency virus types 1 and 2 and by Simian immunodeficiency virus. Virology 181:703-715, 1991.
[6918] 1021. Dragic, T.; Alizon, M.: Different requirements for membrane fusion mediated by the envelopes of human immunodeficiency virus types 1 and 2. J. Virol. 67: 2355-2359, 1993.
[6919] 1022. Federsppiel, B.; Melhado, I. G.; Duncan, A. M. V.; Delaney, A.; Schappert, K.; Clark-Lewis, I.; Jirik, F. R.: Molecular cloning of the cDNA and chromosomal localization of the gene for a putative seven-transmembrane segment (7-TMS) receptor isolated from human spleen. Genomics 16:707-712, 1993.
[6920] 1023. Feng, Y.; Broder, C. C.; Kennedy, P. E.; Berger, E. A.: HIV-1 entry cofactor: functional cDNA cloning of a seven-transmembrane, G protein-coupled receptor. Science 272: 872-876, 1996.
[6921] 1024. Hendrix, C. W.; Flexner, C.; MacFarland, R. T.; Giandomenico, C.; Fuchs, E. J.; Redpath, E.; Bridger, G.; Henson, G. W.: Pharmacokinetics and safety of AMD-3100, a novel antagonist of the CXCR-4 chemokine receptor, in human volunteers. Antimicrob. Agents Chemother. 44:1667-1673, 2000.
[6922] 1025. Herzog, H.; Hort, Y. J.; Shine, J.; Selbie, L. A.: Molecular cloning, characterization, and localization of the human homolog to the reported bovine NPY Y3 receptor: lack of NPY binding and activation. DNA Cell Biol. 12: 465-471, 1993.
[6923] 1026. Jazin, E. E.; Yoo, H.; Blomqvist, A. G.; Yee, F.; Weng, G.; Walker, M. W.; Salon, J.; Larhammar, D.; Wahlestedt, C.: A proposed bovine neuropeptide Y (NPY) receptor cDNA clone, or its human homologue, confers neither NPY binding sites nor NPY responsiveness on transfected cells. Regul. Pept. 47: 247-258, 1993.
[6924] 1027. Liotta, L. A.: An attractive force in metastasis. Nature 410:24-25, 2001.
[6925] 1028. Loetscher, M.; Geiser, T.; O'Reilly, T.; Zwahlen, R.; Baggiolini, M.; Moser, B.: Cloning of a human seven-transmembrane domain receptor, LESTR, that is highly expressed in leukocytes. J. Biol. Chem. 269:232-237, 1994.
[6926] 1029. Lu, M.; Grove, E. A.; Miller, R. J.: Abnormal development of the hippocampal dentate gyrus in mice lacking the CXCR4 chemokine receptor. Proc. Nat. Acad. Sci. 99: 7090-7095, 2002.
[6927] 1030. Ma, Q.; Jones, D.; Borghesani, P. R.; Segal, R. A.; Nagasawa, T.; Kishimoto, T.; Bronson, R. T.; Springer, T. A.: Impaired B-lymphopoiesis, myelopoiesis, and derailed cerebellar neuron migration in CXCR4- and SDF-1-deficient mice. Proc. Nat. Acad. Sci. 95: 9448-9453, 1998.
[6928] 1031. Muller, A.; Homey, B.; Soto, H.; Ge, N.; Catron, D.; Buchanan, M. E.; McClanahan, T.; Murphy, E.; Yuan, W.; Wagner, S. N.; Barrera, J. L.; Mohar, A.; Verastegui, E.; Zlotnik, A.: Involvement of chemokine receptors in breast cancer metastasis. Nature 410: 50-56, 2001.
[6929] 1032. Nagasawa, T.; Hirota, S.; Tachibana, K.; Takakura, N.; Nishikawa, S.; Kitamura, Y.; Yoshida, N.; Kikutani, H.; Kishimoto, T.: Defects of B-cell lymphopoiesis and bone-marrow myelopoiesis in mice lacking the CXC chemokine PBSF/SDF-1. Nature 382: 635-638, 1996.
[6930] 1033. Oberlin, E.; Amara, A.; Bachelerie, F.; Bessia, C.; Virelizier, J.-L.; Arenzana-Seisdedos, F.; Schwartz, O.; Heard, J.-M.; Clark-Lewis, I.; Legler, D. F.; Loetscher, M.; Baggiollini, M.; Moser, B.: The CXC chemokine SDF-1 is the ligand for LESTR/fusin and prevents infection by T-cell-line-adapted HIV-1. Nature 382: 833-835, 1996.
[6931] 1034. Peled, A.; Petit, I.; Kollet, O.; Magid, M.; Ponomaryov, T.; Byk, T.; Nagler, A.; Ben-Hur, H.; Many, A.; Shultz, L.; Lider, O.; Alon, R.; Zipori, D.; Lapidot, T.: Dependence of human stem cell engraftment and repopulation of NOD/SCID mice on CXCR4. Science 283: 845-848, 1999.
[6932] 1035. Rimland, J.; Xin, W.; Sweetnam, P.; Saijoh, K.; Nestler, E. J.; Duman, R. S.: Sequence and expression of a neuropeptide Y receptor cDNA. Molec. Pharm. 40: 869-875, 1991.
[6933] 1036. Tachibana, K.; Hirota, S.; Iizasa, H.; Yoshida, H.; Kawabata, K.; Kataoka, Y.; Kitamura, Y.; Matsushima, K.; Yoshida, N.; Nishikawa, S.; Kishimoto, T.; Nagasawa, T.: The chemokine receptor CXCR4 is essential for vascularization of the gastrointestinal tract. Nature 393:591-594, 1998.
[6934] 1037. Wegner, S. A.; Ehrenberg, P. K.; Chang, G.; Dayhoff, D. E.; Sleeker, A. L.; Michael, N. L.: Genomic organization and functional characterization of the chemokine receptor CXCR4, a major entry co-receptor for human immunodeficiency virus type 1. J. Biol. Chem. 273: 4754-4760, 1998.
[6935] 1038. Weiner, D. B.; Huebner, K.; Williams, W. V.; Greene, M. I.: Human genes other than CD4 facilitate HIV-1 infection of murine cells. Pathobiology 59:361-371, 1991.
[6936] 1039. Szostecki, C.; Guldner, H. H.; Netter, H. J.; Will, H.: Isolation and characterization of cDNA encoding a human nuclear antigen predominantly recognized by autoantibodies from patients with primary biliary cirrhosis. J. Immun. 145: 4338-4347, 1990.
[6937] 1040. Liang, Y.; Buckley, T. R.; Tu, L.; Langdon, S. D.; Tedder, T. F.: Structural organization of the human MS4A gene cluster on chromosome 11q12. Immunogenetics 53: 357-368, 2001.
[6938] 1041. Tedder, T. F.; Disteche, C. M.; Louie, E.; Adler, D. A.; Croce, C. M.; Schlossman, S. F.; Saito, H.: The gene that encodes the human CD20 (B1) differentiation antigen is located on chromosome 11 near the t(11;14)(q13;q32) translocation site. J. Immun. 142: 2555-2559, 1989.
[6939] 1042. Tedder, T. F.; Klejman, G.; Schlossman, S. F.; Saito, H.: Structure of the gene encoding the human B lymphocyte differentiation antigen CD20 (B1). J. Immun. 142: 2560-2568, 1989.
[6940] 1043. Tedder, T. F.; Streuli, M.; Schlossman, S. F.; Saito, H.: Isolation and structure of a cDNA encoding the B1 (CD20) cell-surface antigen of human B lymphocytes. Proc. Nat. Acad. Sci. 85: 208-212, 1988.
[6941] 1044. Olavesen, M. G.; Bentley, E.; Mason, R. V. F.; Stephens, R. J.; Ragoussis, J.: Fine mapping of 39 ESTs on human chromosome 6p23-p25. Genomics 46:303-306, 1997.
[6942] 1045. Thaung, C.; West, K.; Clark, B. J.; McKie, L.; Morgan, J. E.; Arnold, K.; Nolan, P. M.; Peters, J.; Hunter, A. J.; Brown, S. D. M.; Jackson, I. J.; Cross, S. H.: Novel ENU-induced eye mutations in the mouse: models for human eye disease. Hum. Molec. Genet. 11:755-767, 2002.
[6943] 1046. Baumann, C. A.; Ribon, V.; Kanzaki, M.; Thurmond, D. C.; Mora, S.; Shigematsu, S.; Bickel, P. E.; Pessin, J. E.; Saltiel, A. R.: CAP defines a second signalling pathway required for insulin-stimulated glucose transport. Nature 407: 202-207, 2000.
[6944] 1047. Brissenden, J. E.; Ullrich, A.; Francke, U.: Chromosomal mapping of loci for insulin-like growth factors I and II and for epidermal growth factor in man. (Abstract) Am. J. Hum. Genet. 36: 133S only, 1984.
[6945] 1048. Brissenden, J. E.; Ullrich, A.; Francke, U.: Human chromosomal mapping of genes for insulin-like growth factors I and II and epidermal growth factor. Nature 310: 781-784, 1984.
[6946] 1049. Morton, C. C.; Byers, M. G.; Nakai, H.; Bell, G. I.; Shows, T. B.: Human genes for insulin-like growth factors I and II and epidermal growth factor are located on 12q22-q24.1, 11p15, and 4q25-q27, respectively. Cytogenet. Cell Genet. 41: 245-249, 1986.
[6947] 1050. Ishii, H.; Baffa, R.; Numata, S.-I.; Murakumo, Y.; Rattan, S.; Inoue, H.; Mori, M.; Fidanza, V.; Alder, H.; Croce, C. M.: The FEZ1 gene at chromosome 8p22 encodes a leucine-zipper protein, and its expression is altered in multiple human tumors. Proc. Nat. Acad. Sci. 96: 3928-3933, 1999.
[6948] 1051. Williamson, J. A.; Bosher, J. M.; Skinner, A.; Sheer, D.; Williams, T.; Hurst, H. C.: Chromosomal mapping of the human and mouse homologues of two new members of the AP-2 family of transcription factors. Genomics 35:262-264, 1996.
[6949] 1052. Agarwal, V. R.; Ashanullah, C. I.; Simpson, E. R.; Bulun, S. E.: Alternatively spliced transcripts of the aromatase cytochrome P450(CYP19) gene in adipose tissue of women. J. Clin. Endocr. Metab. 82:70-74, 1997.
[6950] 1053. Yang, R.; Morosetti, R.; Koeffler, H. P.: Characterization of a second human cyclin A that is highly expressed in testis and in several leukemic cell lines. Cancer Res. 57: 913-920, 1997.
[6951] 1054. Lew, D. J.; Dulic, V.; Reed, S. I.: Isolation of three novel human cyclins by rescue of G1 cyclin (cln) function in yeast. Cell 66:1197-1206, 1991.
[6952] 1055. Li, H.; Lahti, J. M.; Valentine, M.; Saito, M.; Reed, S. I.; Look, A. T.; Kidd, V. J.: Molecular cloning and chromosomal localization of the human cyclin C (CCNC) and cyclin E (CCNE) genes: deletion of the CCNC gene in human tumors. Genomics 32: 253-259, 1996.
[6953] 1056. Sheaff, R. J.; Groudine, M.; Gordon, M.; Roberts, J. M.; Clurman, B. E.: Cyclin E-CDK2 is a regulator of p27(Kip1). Genes Dev. 11:1464-1478, 1997.
[6954] 1057. Akoulitchev, S.; Chuikov, S.; Reinberg, D.: TFIIH is negatively regulated by cdk8-containing mediator complexes. Nature 407: 102-106, 2000.
[6955] 1058. Trask, B.; Fertitta, A.; Christensen, M.; Youngblom, J.; Bergmann, A.; Copeland, A.; deJong, P.; Mohrenweiser, H.; Olsen, A.; Carrano, A.; Tynan, K.: Fluorescence in situ hybridization mapping of human chromosome 19: cytogenetic band location of 540 cosmids and 70 genes or DNA markers. Genomics 15: 133-145, 1993.
[6956] 1059. Holland, E. C.; Celestino, J.; Dai, C.; Schaefer, L.; Sawaya, R. E.; Fuller, G. N.: Combined activation of Ras and Akt in neural progenitors induces glioblastoma formation in mice. Nature Genet. 25:55-57, 2000.
[6957] 1060. Efstratiadis, A.; Posakony, J. W.; Maniatis, T.; Lawn, R. M.; O'Connell, C.; Spritz, R. A.; DeRiel, J. K.; Forget, B. G.; Weissman, S. M.; Slightom, J. L.; Blechl, A. E.; Smithies, O.; Baralle, F. E.; Shoulders, C. C.; Proudfoot, N. J.: The structure and evolution of the human beta-globin gene family. Cell 21: 653-668, 1980.
[6958] 1061. Doyle, J.; Hoffman, S.; Ucla, C.; Reith, W.; Mach, B.; Stubbs, L.: Locations of human and mouse genes encoding the RFX1 and RFX2 transcription factor proteins. Genomics 35: 227-230, 1996.
[6959] 1062. Pugliatti, L.; Derre, J.; Berger, R.; Ucla, C.; Reith, W.; Mach, B.: The genes for MHC class II regulatory factors RFX1 and RFX2 are located on the short arm of chromosome 19. Genomics 13: 1307-1310, 1992.
[6960] 1063. Reith, W.; Ucla, C.; Barras, E.; Gaud, A.; Durand, B.; Herrero-Sanchez, C.; Kobr, M.; Mach, B.: RFX1, a transactivator of hepatitis B virus enhancer 1, belongs to a novel family of homodimeric and heterodimeric DNA-binding proteins. Molec. Cell. Biol. 14: 1230-1244, 1994.
[6961] 1064. Creutz, C. E.; Tomsig, J. L.; Snyder, S. L.; Gautier, M.-C.; Skouri, F.; Beisson, J.; Cohen, J.: The copines, a novel class of C2 domain-containing, calcium-dependent, phospholipid-binding proteins conserved from Paramecium to humans. J. Biol. Chem. 273: 1393-1402, 1998.
[6962] 1065. Caudell, E. G.; Caudell, J. J.; Tang, C.-H.; Yu, T.-K.; Frederick, M. J.; Grimm, E. A.: Characterization of human copine III as a phosphoprotein with associated kinase activity. Biochemistry 39: 13034-13043, 2000.
[6963] 1066. Lai, C.-H.; Chou, C.-Y.; Ch'ang, L.-Y.; Liu, C.-S.; Lin, W.: Identification of novel human genes evolutionarily conserved in Caenorhabditis elegans by comparative proteomics. Genome Res. 10: 703-713, 2000.
[6964] 1067. Pappu, R.; Cheng, A. M.; Li, B.; Gong, Q.; Chiu, C.; Griffin, N.; White, M.; Sleckman, B. P.; Chan, A. C.: Requirement for B cell linker protein (BLNK) in B cell development. Science 286: 1949-1954, 1999.
[6965] 1068. Wienands, J.; Schweikert, J.; Wollscheid, B.; Jumaa, H.; Nielsen, P. J.; Reth, M.: SLP-65: a new signaling component in B lymphocytes which requires expression of the antigen receptor for phosphorylation. J. Exp. Med. 188: 791-795, 1998.
[6966] 1069. Muto, T.; Muramatsu, M.; Taniwaki, M.; Kinoshita, K.; Honjo, T.: Isolation, tissue distribution, and chromosomal localization of the human activation-induced cytidine deaminase (AID) gene. Genomics 68:85-88, 2000.
[6967] 1070. Geck, P.; Maffini, M. V.; Szelei, J.; Sonnenschein, C.; Soto, A. M.: Androgen-induced proliferative quiescence in prostate cancer cells: the role of AS3 as its mediator. Proc. Nat. Acad. Sci. 97:10185-10190, 2000.
[6968] 1071. Kas, K.; Finger, E.; Grall, F.; Gu, X.; Akbarali, Y.; Boltax, J.; Weiss, A.; Oettgen, P.; Kapeller, R.; Libermann, T. A.: ESE-3, a novel member of an epithelium-specific Ets transcription factor subfamily, demonstrates different target gene specificity from ESE-1. J. Biol. Chem. 275: 2986-2998, 2000.
[6969] 1072. Kleinbaum, L. A.; Duggan, C.; Ferreira, E.; Coffey, G. P.; Buttice, G.; Burton, F. H.: Human chromosomal localization, tissue/tumor expression, and regulatory function of the ets family gene EHF. Biochem. Biophys. Res. Commun. 264: 119-126, 1999.
[6970] 1073. Zhao, L.; Gregoire, F.; Sul, H. S.: Transient induction of ENC-1, a kelch-related actin-binding protein, is required for adipocyte differentiation. J. Biol. Chem. 275: 16845-16850, 2000.
[6971] 1074. Scott, A. F.: Personal Communication. Baltimore, Md. Oct. 23, 2001.
[6972] 1075. Woodroofe, M. N.; Tunnacliffe, A.; Pym, B.; Goodfellow, P. N.; Walsh, F. S.: Human muscle cell surface antigen 16-3A5 is encoded by a gene on chromosome 11. Somat. Cell Molec. Genet. 10: 535-540, 1984.
[6973] 1076. Bilezikian, J. P.; Morishima, A.; Bell, J.; Grumbach, M. M.: Increased bone mass as a result of estrogen therapy in a man with aromatase deficiency. New Eng. J. Med. 339: 599-603, 1998.
[6974] 1077. Bulun, S. E.: Aromatase deficiency in women and men: would you have predicted the phenotypes? J. Clin. Endocr. Metab. 81: 867-871, 1996.
[6975] 1078. Carani, C.; Qin, K.; Simoni, M.; Faustini-Fustini, M.; Serpente, S.; Boyd, J.; Korach, K. S.; Simpson, E. R.: Effect of testosterone and estradiol in a man with aromatase deficiency. New Eng. J. Med. 337:91-95, 1997.
[6976] 1079. Chen, S.; Besman, M. J.; Sparkes, R. S.; Zollman, S.; Klisak, I.; Mohandas, T.; Hall, P. F.; Shively, J. E.: Human aromatase: cDNA cloning, Southern blot analysis, and assignment of the gene to chromosome 15. DNA 7: 27-38, 1988.
[6977] 1080. Chen, S.; Shively, J. E.; Nakajin, S.; Shinoda, M.; Hall, P. F.: Amino terminal sequence analysis of human placenta aromatase. Biochem. Biophys. Res. Commun. 135: 713-719, 1986.
[6978] 1081. Conte, F. A.; Grumbach, M. M.; Ito, Y.; Fisher, C. R.; Simpson, E. R.: A syndrome of female pseudohermaphrodism, hypergonadotropichypogonadism, and multicystic ovaries associated with missense mutations in the gene encoding aromatase (P450arom). J. Clin. Endocr. Metab. 78:1287-1292, 1994.
[6979] 1082. Corbin, C. J.; Graham-Lorence, S.; McPhaul, M.; Mason, J. I.; Mendelson, C. R.; Simpson, E. R.: Isolation of a full-length cDNA insert encoding human aromatase system cytochrome P-450 and its expression in nonsteroidogenic cells. Proc. Nat. Acad. Sci. 85: 8948-8952, 1988.
[6980] 1083. Deladoey, J.; Fluck, C.; Bex, M.; Yoshimura, N.; Harada, N.; Mullis, P. E.: Aromatase deficiency caused by a novel P450(arom) gene mutation: impact of absent estrogen production on serum gonadotropin concentration in a boy. J. Clin. Endocr. Metab. 84: 4050-4054, 1999.
[6981] 1084. Ellis, J. A.; Stebbing, M.; Harrap, S. B.: Significant population variation in adult male height associated with the Y chromosome and the aromatase gene. J. Clin. Endocr. Metab. 86: 4147-4150, 2001.
[6982] 1085. Evans, C. T.; Ledesma, D. B.; Schulz, T. Z.; Simpson, E. R.; Mendelson, C. R.: Isolation and characterization of a complementary DNA specific for human aromatase-system cytochrome P-450 mRNA. Proc. Nat. Acad. Sci. 83: 6387-6391, 1986.
[6983] 1086. Fisher, C. R.; Graves, K. H.; Parlow, A. F.; Simpson, E. R.: Characterization of mice deficient in aromatase (ArKO) because of targeted disruption of the cyp19 gene. Proc. Nat. Acad. Sci. 95:6965-6970, 1998.
[6984] 1087. George, F. W.; Matsumine, H.; McPhaul, M. J.; Somes, R. G., Jr.; Wilson, J. D.: Inheritance of the henny feathering trait in the Golden Campine chicken: evidence for allelism with the gene that causes henny feathering in the Sebright Bantam. J. Hered. 81: 107-110, 1990.
[6985] 1088. George, F. W.; Wilson, J. D.: Pathogenesis of the henny feathering trait in the Sebright Bantam chicken. J. Clin. Invest. 66: 57-65, 1980.
[6986] 1089. Harada, N.: Cloning of a complete cDNA encoding human aromatase: immunochemical identification and sequence analysis. Biochem. Biophys. Res. Commun. 156: 725-732, 1988.
[6987] 1090. Harada, N.; Ogawa, H.; Shozu, M.; Yamada, K.: Genetic studies to characterize the origin of the mutation in placental aromatase deficiency. Am. J. Hum. Genet. 51: 666-672, 1992.
[6988] 1091. Harada, N.; Ogawa, H.; Shozu, M.; Yamada, K.; Suhara, K.; Nishida, E.; Takagi, Y.: Biochemical and molecular genetic analyses on placental aromatase (P-450-AROM) deficiency. J. Biol. Chem. 267: 4781-4785, 1992.
[6989] 1092. Hemsell, D. L.; Edman, C. D.; Marks, J. F.; Siiteri, P. K.; MacDonald, P. C.: Massive extraglandular aromatization of plasma and rostenedione resulting in feminization of a prepubertal boy. J. Clin. Invest. 60:455-464, 1977.
[6990] 1093. Ito, Y.; Fisher, C. R.; Conte, F. A.; Grumbach, M. M.; Simpson, E. R.: Molecular basis of aromatase deficiency in an adult female with sexual infantilism and polycystic ovaries. Proc. Nat. Acad. Sci. 90: 11673-11677, 1993.
[6991] 1094. Leiberman, E.; Zachmann, M.: Familial adrenal feminization probably due to increased steroid aromatization. Hormone Res. 37: 96-102, 1992.
[6992] 1095. Leshin, M.; Baron, J.; George, F. W.; Wilson, J. D.: Increased estrogen formation and aromatase activity in fibroblasts cultured from the skin of chickens with the Henny feathering trait. J. Biol. Chem. 256: 4341-4344, 1981.
[6993] 1096. Leshin, M.; George, F. W.; Wilson, J. D.: Increased estrogen synthesis in the Sebright bantam is due to a mutation that causes increased aromatase activity. Trans. Assoc. Am. Phys. 94: 97-105, 1981.
[6994] 1097. Mango, D.; Montemurro, A.; Scirpa, P.; Bompiani, A.; Menini, E.: Four cases of pregnancy with low estrogen production due to placental enzymatic deficiency. Europ. J. Obstet. Gynec. Reprod. Biol. 8:65-71, 1978.
[6995] 1098. McTernan, P. G.; Anderson. L. A.; Anwar, A. J.; Eggo, M. C.; Crocker, J.; Barnett, A. H.; Stewart, P. M.; Kumar, S.: Glucocorticoid regulation of P450 aromatase activity in human adipose tissue: gender and site differences. J. Clin. Endocr. Metab. 87: 1327-1336, 2002.
[6996] 1099. Morishima, A.; Grumbach, M. M.; Simpson, E. R.; Fisher, C.; Qin, K.: Aromatase deficiency in male and female siblings caused by a novel mutation and the physiological role of estrogens. J. Clin. Endocr. Metab. 80: 3689-3698, 1995.
[6997] 1100. Mullis, P. E.; Yoshimura, N.; Kuhlmann, B.; Lippuner, K.; Jaeger, P.; Harada, H.: Aromatase deficiency in a female who is compound heterozygote for two new point mutations in the P450(arom) gene: impact of estrogens on hypergon adotropic hypogonadism, multicystic ovaries, and bone densitometry in childhood. J. Clin. Endocr. Metab. 82:1739-1745, 1997.
[6998] 1101. Phornphutkul, C.; Okubo, T.; Wu, K.; Harel, Z.; Tracy, T. F. Jr.; Pinar, H.; Chen, S.; Gruppuso, P. A.; Goodwin, G.: Aromatase P450 expression in a feminizing adrenal adenoma presenting as isosexual precocious puberty. J. Clin. Endocr. Metab. 86: 649-652, 2001.
[6999] 1102. Robertson, K. M.; O'Donnell, L.; Jones, M. E. E.; Meachem, S. J.; Boon, W. C.; Fisher, C. R.; Graves, K. H.; McLachlan, R. I.; Simpson, E. R.: Impairment of spermatogenesis in mice lacking a functional aromatase (cyp 19) gene. Proc. Nat. Acad. Sci. 96: 7986-7991, 1999.
[7000] 1103. Sebastian, S.; Bulun, S. E.: A highly complex organization of the regulatory region of the human CYP19 (aromatase) gene revealed by the Human Genome Project. J. Clin. Endocr. Metab. 86: 4600-4602, 2001.
[7001] 1104. Everman, D. B.; Bartels, C. F.; Yang, Y.; Yanamandra, N.; Goodman, F. R.; Mendoza-Londono, J. R.; Savarirayan, R.; White, S. M.; Graham, J. M., Jr.; Gale, R. P.; Svarch, E.; Newman, W. G.; Kleckers, A. R.; Francomano, C. A.; Govindaiah, V.; Singh, L.; Morrison, S.; Thomas, J. T.; Warman, M. L.: The mutational spectrum of brachydactyly type C. Am. J. Med. Genet. 112: 291-296, 2002.
[7002] 1105. Galjaard, R. J. H.; van der Ham, L. I.; Posch, N. A. S.; Dijkstra, P. F.; Oostra, B. A.; Hovius, S. E. R.; Timmenga, E. J. F.; Sonneveld, G. J.; Hoogeboom, A. J. M.; Heutink, P.: Differences in complexity of isolated brachydactyly type C cannot be attributed to locus heterogeneity alone. Am. J. Med. Genet. 98: 256-262, 2001.
[7003] 1106. Haws, D. V.: Inherited brachydactyly and hypoplasia of the bones of the extremities. Ann. Hum. Genet. 26: 201-212, 1963.
[7004] 1107. Polinkovsky, A.; Robin, N. H.; Thomas, J. T.; Irons, M.; Lynn, A.; Goodman, F. R.; Reardon, W.; Kant, S. G.; Brunner, H. G.; vander Burgt, I.; Chitayat, D.; McGaughran, J.; Donnai, D.; Luyten, F. P.; Warman, M. L.: Mutations in CDMP1 cause autosomal dominant brachydactyly type C. (Letter) Nature Genet. 17: 18-19, 1997.
[7005] 1108. Polymeropoulos, M. H.; Ide, S. E.; Magyari, T.; Francomano, C. A.: Brachydactyly type C gene maps to human chromosome 12q24. Genomics 38:45-50, 1996.
[7006] 1109. Robin, N. H.; Gunay-Aygun, M.; Polinkovsky, A.; Warman, M. L.; Morrison, S.: Clinical and locus heterogeneity in brachydactyly type C. Am. J. Med. Genet. 68: 369-377, 1997.
[7007] 1110. Storm, E. E.; Huynh, T. V.; Copeland, N. G.; Jenkins, N. A.; Kingsley, D. M.; Lee, S. J.: Limb alterations in brachypodism mice due to mutation sin a new member of the TGF-beta superfamily. Nature 368: 639-643, 1994.
[7008] 1111. Zetterstrom, R. H.; Solomin, L.; Jansson, L.; Hoffer, B. J.; Olson, L.; Perlmann, T.: Dopamine neuron agenesis in Nurr1-deficient mice. Science 276:248-250, 1997.
[7009] 1112. Koi, M.; Johnson, L. A.; Kalikin, L. M.; Little, P. F. R.; Nakamura, Y.; Feinberg, A. P.: Tumor cell growth arrest caused by subchromosomal transferable DNA fragments from chromosome 11. Science 260: 361-364, 1993.
[7010] 1113. Tsavaler, L.; Shapero, M. H.; Morkowski, S.; Laus, R.: Trp-p8, a novel prostate-specific gene, is up-regulated in prostate cancer and other malignancies and shares high homology with transient receptor potential calcium channel proteins. Cancer Res. 61: 3760-3769, 2001.
[7011] 1114. Hu, R.-J.; Lee, M. P.; Connors, T. D.; Johnson, L. A.; Burn, T. C.; Su, K.; Landes, G. M.; Feinberg, A. P.: A 2.5-Mb transcript map of a tumor-suppressing subchromosomal transferable fragment from 11p15.5, and isolation and sequence analysis of three novel genes. Genomics 46:9-17, 1997.
[7012] 1115. Schmidt, A.; Wolde, M.; Thiele, C.; Fest, W.; Kratzin, H.; Podtelejnikov, A. V.; Witke, W.; Huttner, W. B.; Soling, H.-D.: Endophilin I mediates synaptic vesicle formation by transfer of arachidonate to lysophosphatidic acid. Nature 401: 133-141, 1999.
[7013] 1116. Nagase, T.; Ishikawa, K.; Suyama, M.; Kikuno, R.; Hirosawa, M.; Miyajima, N.; Tanaka, A.; Kotani, H.; Nomura, N.; Ohara, O.: Prediction of the coding sequences of unidentified human genes. XII. The complete sequences of 100 new cDNA clones from brain which code for large proteins in vitro. DNA Res. 5: 355-364, 1998.
[7014] 1117. Dent, A. L.; Yewdell, J.; Puvion-Dutilleul, F.; Koken, M. H.; deThe, H.; Staudt, L. M.: LYSP100 associated nuclear domains (LANDs): description of a new class of subnuclear structures and their relationship to PML nuclear bodies. Blood 88: 1423-1426, 1996.
[7015] 1118. Seeler, J. S.; Marchio, A.; Sitterlin, D.; Transy, C.; Dejean, A.: Interaction of SP100 with HP1 proteins: a link between the promyelocytic leukemia-associated nuclear bodies and the chromatin compartment. Proc. Nat. Acad. Sci. 95: 7316-7321, 1998.
[7016] 1119. Bahary, N.; Zorich, G.; Pachter, J. E.; Leibel, R. L.; Friedman, J. M.: Molecular genetic linkage maps of mouse chromosomes 4 and 6. Genomics 11: 33-47, 1991.
[7017] 1120. Callen, D. F.; Chen, L. Z.; Nancarrow, J.; Whitmore, S. A.; Apostolou, S.; Thompson, A. D.; Lane, S. A.; Stallings, R. L.; Hildebrand, C. E.; Harris, P. G.; Sutherland, G. R.: Current state of the physical map of human chromosome 16. (Abstract) Cytogenet. Cell Genet. 58:1998 only, 1991.
[7018] 1121. Corbi, A. L.; Larson, R. S.; Kishimoto, T. K.; Springer, T. A.; Morton, C. C.: Chromosomal location of the genes encoding the leukocyte adhesion receptors LFA-1, Mac-1 and p150,95: identification of a gene cluster involved in cell adhesion. J. Exp. Med. 167: 1597-1607, 1988.
[7019] 1122. Amagai, M.; Klaus-Kovtun, V.; Stanley, J. R.: Autoantibodies against a novel epithelial cadherin in pemphigus vulgaris, a disease of cell adhesion. Cell 67: 869-877, 1991.
[7020] 1123. Koch, P. J.; Mahoney, M. G.; Ishikawa, H.; Pulkkinen, L.; Uitto, J.; Schultz, L.; Murphy, G. F.; Whitaker-Menezes, D.; Stanley, J. R.: Targeted disruption of the pemphigus vulgaris antigen (desmoglein3) gene in mice causes loss of keratinocyte cell adhesion with a phenotype similar to pemphigus vulgaris. J. Cell Biol. 137: 1091-1102, 1997.
[7021] 1124. Wang, Y.; Amagai, M.; Minoshima, S.; Sakai, K.; Green, K. J.; Nishikawa, T.; Shimizu, N.: The human genes for desmogleins (DSG1 and DSG3) are located in a small region on chromosome 18q12. Genomics 20:492-495, 1994.
[7022] 1125. DerKinderen, D. J.; Koten, J. W.; Tan, K. E. W. P.; Beemer, F. A.; Van Romunde, L. K. J.; Den Otter, W.: Parental age in sporadic hereditary retinoblastoma. Am. J. Ophthal. 110: 605-609, 1990.
[7023] 1126. Friedman, L. S.; Ostermeyer, E. A.; Lynch, E. D.; Welcsh, P.; Szabo, C. I.; Meza, J. E.; Anderson, L. A.; Dowd, P.; Lee, M. K.; Rowell, S. E.; Ellison, J.; Boyd, J.; King, M.-C.: 22 genes from chromosome 17q21: cloning, sequencing, and characterization of mutations in breast cancer families and tumors. Genomics 25: 256-163, 1995.
[7024] 1127. Linial, M.; Miller, K.; Scheller, R. H.: VAT-1: an abundant membrane protein from Torpedo cholinergic synaptic vesicles. Neuron 2: 1265-1273, 1989.
[7025] 1128. Smith, T. M.; Lee, M. K.; Szabo, C. I.; Jerome, N.; McEuen, M.; Taylor, M.; Hood, L.; King, M.-C.: Complete genomic sequence and analysis of 117 kb of human DNA containing the gene BRCA1. Genome Res. 6: 1029-1049, 1996.
[7026] 1129. Bause, E.; Bieberich, E.; Rolfs, A.; Volker, C.; Schmidt, B.: Molecular cloning and primary structure of Man(9)-mannosidase from human kidney. Eur. J. Biochem. 217: 535-540, 1993.
[7027] 1130. Tremblay, L. O; Campbell Dyke, N.; Herscovics, A.: Molecular cloning, chromosomal mapping and tissue specific expression of a novel human alpha-1,2-mannosidase gene involved in N-glycan maturation. Glycobiology 8:585-595, 1998.
[7028] 1131. Hubener, C.; Mincheva, A.; Lichter, P.; Schraven, B.; Bruyns, E.: Genomic organization and chromosomal localization of the human gene encoding the T-cell receptor-interacting molecule (TRIM). Immunogenetics 51:154-158, 2000.
[7029] 1132. Bruyns, E.; Marie-Cardine, A.; Kirchgessner, H.; Sagolla, K.; Shevchenko, A.; Mann, M.; Autschbach, F.; Bensussan, A.; Meuer, S.; Schraven, B.: T cell receptor (TCR) interacting molecule (TRIM), a novel disulfide-linked dimer associated with the TCR-CD3-zeta complex, recruits intracellular signaling proteins to the plasma membrane. J. Exp. Med. 188: 561-575, 1998.
[7030] 1133. Zhao, R.; Qi, Y.; Chen, J.; Zhao, Z. J.: FYVE-DSP2, a FYVE domain-containing dual specificity protein phosphatase that dephosphorylates phosphotidylinositol (sic) 3-phosphate. Exp. Cell Res. 265: 329-338, 2001.
[7031] 1134. Frye, R. A.: Characterization of five human cDNAs with homology to the yeast SIR2 gene: Sir2-like proteins (sirtuins) metabolize NAD and may have protein ADP-ribosyltransferase activity. Biochem. Biophys. Res. Commun. 260: 273-279, 1999.
[7032] 1135. Imai, S.; Armstrong, C. M.; Kaeberlein, M.; Guarente, L.: Transcriptional silencing and longevity protein Sir2 is an NAD-dependent histone deacetylase. Nature 403:795-800, 2000.
[7033] 1136. Kimura, A.; Umehara, T.; Horikoshi, M.: Chromosomal gradient of histone acetylation established by Sas2p and Sir2p functions as a shield against gene silencing. Nature Genet. 15 October: 2002. Note: Advance Electronic Publication.
[7034] 1137. Fedi, P.; Bafico, A.; Soria, A. N.; Burgess, W. H.; Miki, T.; Bottaro, D. P.; Kraus, M. H.; Aaronson, S. A.: Isolation and biochemical characterization of the human Dkk-1 homologue, a novel inhibitor of mammalian Wnt signaling. J. Biol. Chem. 274: 19465-19472, 1999.
[7035] 1138. Krupnik, V. E.; Sharp, J. D.; Jiang, C.; Robison, K.; Chickering, T. W.; Amaravadi, L.; Brown, D. E.; Guyot, D.; Mays, G.; Leiby, K.; Chang, B.; Duong, T.; Goodearl, A. D. J.; Gearing, D. P.; Sokol, S. Y.; McCarthy, S. A.: Functional and structural diversity of the human Dickkopf gene family. Gene 238: 301-313, 1999.
[7036] 1139. Roessler, E.; Du, Y.; Glinka, A.; Dutra, A.; Niehrs, C.; Muenke, M.: The genomic structure, chromosome location, and analysis of the human DKK1 head inducer gene as a candidate for holoprosencephaly. Cytogenet. Cell Genet. 89: 220-224, 2000.
[7037] 1140. Lebre, A.-S.; Jamot, L.; Takahashi, J.; Spasskey, N.; Leprince, C.; Ravise, N.; Zander, Fujigasaki, H.; Kussel-Andermann, P.; Duyckaerts, C.; Camonis, J. H.; Brice, A.: Ataxin-7 interacts with a Cbl-associated protein that it recruits into neuronal intranuclear inclusions. Hum. Molec. Genet. 10: 10:-1201-1213, 2001.
[7038] 1141. Lin, W.-H.; Chiu, K. C.; Chang, H.-M.; Lee, K.-C.; Tai, T.-Y.; Chuang, L.-M.: Molecular scanning of the human sorbin and SH3-domain-containing-1(SORBS1) gene: positive association of the T228A polymorphism with obesity and type 2 diabetes. Hum. Molec. Genet. 10: 1753-1760, 2001.
[7039] 1142. Scott, A. F.: Personal Communication. Baltimore, Md. Sep. 13, 2000.
[7040] 1143. Luo, J.; Nikolaev, A. Y.; Imai, S.; Chen, D.; Su, F.; Shiloh, A.; Guarente, L.; Gu, W.: Negative control of p53 by Sir2-alpha promotes cell survival under stress. Cell 107: 137-148, 2001.
[7041] 1144. Shore, D.; Squire, M.; Nasmyth, K. A.: Characterization of two genes required for the position-effect control of yeast mating-type genes. EMBO J. 3: 2817-2823, 1984.
[7042] 1145. Suka, N.; Luo, K.; Grunstein, M.: Sir2p and Sas2p opposingly regulate acetylation of yeast histone H4 lysine 16 and spreading of heterochromatin. Nature Genet. 15 October: 2002. Note: Advance Electronic Publication.
[7043] 1146. Tanny, J. C.; Dowd, G. J.; Huang, J.; Hilz, H.; Moazed, D.: An enzymatic activity in the yeast Sir2 protein that is essential for gene silencing. Cell 99: 735-745, 1999.
[7044] 1147. Vaziri, H.; Dessain, S. K.; Eaton, E. N.; Imai, S.-I.; Frye, R. A.; Pandita, T. K.; Guarente, L.; Weinberg, R. A.: hSIR2-SIRT1 functions as an NAD-dependent p53 deacetylase. Cell 107: 149-159, 2001.
[7045] 1148. Liu, J.; Shworak, N. W.; Sinay, P.; Schwartz, J. J.; Zhang, L.; Fritze, L. M.; Rosenberg, R. D.: Expression of heparan sulfate D-glucosaminyl3-O-sulfotransferase isoforms reveals novel substrate specificities. J. Biol. Chem. 274: 5185-5192, 1999.
[7046] 1149. Shworak, N. W.; Liu, J.; Petros, L. M.; Zhang, L.; Kobayashi, M.; Copeland, N. G.; Jenkins, N. A.; Rosenberg, R. D.: Multiple isoforms of heparan sulfate D-glucosaminyl 3-O-sulfotransferase: isolation, characterization, and expression of human cDNAs and identification of distinct genomic loci. J. Biol. Chem. 274: 5170-5184, 1999.
[7047] 1150. Michel, J. J.; Xiong, Y.: Human CUL-1, but not other cullin family members, selectively interacts with SKP1 to form a complex with SKP2 and cyclin A. Cell Growth Differ. 9: 435-449, 1998.
[7048] 1151. Du, M.; Sansores-Garcia, L.; Zu, Z.; Wu, K. K.: Cloning and expression analysis of a novel salicylate suppressible gene, Hs-CUL-3, a member of cullin/Cdc53 family. J. Biol. Chem. 273: 24289-24292, 1998.
[7049] 1152. Bao, S.; Shen, X.; Shen, K.; Liu, Y.; Wang, X.-F.: The mammalian Rad24 homologous to yeast Saccharomyces cerevisiae Rad24 and Schizosaccharomyces pombe Rad17 is involved in DNA damage checkpoint. Cell Growth Diff. 9:961-967, 1998.
[7050] 1153. Bao, S.; Chang, M.-S.; Auclair, D.; Sun, Y.; Wang, Y.; Wong, W.-K.; Zhang, J.; Liu, Y.; Qian, X.; Sutherland, R.; Magi-Galluzi, C.; Weisberg, E.; Cheng, E. Y. S.; Hao, L.; Sasaki, H.; Campbell, M. S.; Kraeft, S.-K.; Loda, M.; Lo, K.-M.; Chen, L. B.: Hrad17, a human homologue of the Schizosaccharomyces pombe checkpoint gene rad17, is overexpressed in colon carcinoma. Cancer Res. 59: 2023-2028, 1999.
[7051] 1154. Bluyssen, H. A. R.; Naus, N. C.; van Os, R. I.; Jaspers, I.; Hoeijmakers, J. H. J.; de Klein, A.: Human and mouse homologues of the Schizosaccharomyces pombe rad17+ cell cycle checkpoint control gene. Genomics 55: 219-228, 1999.
[7052] 1155. Boyer, S. H.; Fainer, D. C.; Watson-Williams, E. J.: Lactate dehydrogenasevariant from human blood: evidence for molecular subunits. Science 141:642-643, 1963.
[7053] 1156. Delmas, B.; Gelfi, J.; L'Haridon, R.; Vogel, L. K.; Sjostrom, H.; Noren, O.; Laude, H.: Aminopeptidase N is a major receptor for the enteropathogenic coronavirus TGEV. Nature 357: 417-420, 1992.
[7054] 1157. Kruse, T. A.; Bolund, L.; Grzeschik, K.-H.; Ropers, H. H.; Olsen, J.; Sjostrom, H.; Noren, O.: Assignment of the human aminopeptidase N (peptidase E) gene to chromosome 15q13-qter. FEBS Lett. 239: 305-308, 1988.
[7055] 1158. Look, A. T.; Ashmun, R. A.; Shapiro, L. H.; Peiper, S. C.: Human myeloid plasma membrane glycoprotein CD13 (gp150) is identical to aminopeptidase N. J. Clin. Invest. 83: 1299-1307, 1989.
[7056] 1159. Look, A. T.; Peiper, S. C.; Rebentisch, M. B.; Ashmun, R. A.; Roussel, M. F.; Lemons, R. S.; Le Beau, M. M.; Rubin, C. M.; Sherr, C. J.: Molecular cloning, expression, and chromosomal localization of the gene encoding a human myeloid membrane antigen (gp150). J. Clin. Invest. 78: 914-921, 1986.
[7057] 1160. Watt, V. M.; Willard, H. F.: The human aminopeptidase N gene: isolation, chromosome localization, and DNA polymorphism analysis. Hum. Genet. 85: 651-654, 1990.
[7058] 1161. Yeager, C. L.; Ashmun, R. A.; Williams, R. K.; Cardellichio, C. B.; Shapiro, L. H.; Look, A. T.; Holmes, K. V.: Human aminopeptidase N is a receptor for human coronavirus 229E. Nature 357: 420-422, 1992.
[7059] 1162. Santoro, M.; Carlomagno, F.; Hay, I. D.; Herrmann, M. A.; Grieco, M.; Melillo, R.; Pierotti, M. A.; Bongarzone, I.; Della Porta, G.; Berger, N.; Peix, J. L.; Paulin, C.; Fabien, N.; Vecchio, G.; Jenkins, R. B.; Fusco, A.: Ret oncogene activation in human thyroid neoplasms is restricted to the papillary cancer subtype. J. Clin. Invest. 89:1517-1522, 1992.
[7060] 1163. Santoro, M.; Carlomagno, F.; Romano, A.; Bottaro, D. P.; Dathan, N. A.; Grieco, M.; Fusco, A.; Vecchio, G.; Matoskova, B.; Kraus, M. H.; Di Fiore, P. P.: Activation of RET as a dominant transforming gene by germline mutations of MEN2A and MEN2B. Science 267: 381-383, 1995.
[7061] 1164. Schuchardt, A.; D'Agati, V.; Larsson-Blomberg, L.; Costantini, F.; Pachnis, V.: Defects in the kidney and enteric nervous system of mice lacking the tyrosine kinase receptor Ret. Nature 367: 380-383, 1994.
[7062] 1165. Shirahama, S.; Ogura, K.; Takami, H.; Ito, K.; Tohsen, T.; Miyauchi, A.; Nakamura, Y.: Mutational analysis of the RET proto-oncogene in 71 Japanese patients with medullary thyroid carcinoma. J. Hum. Genet. 43:101-106, 1998.
[7063] 1166. Seri, M.; Yin, L.; Barone, A.; Bolino, A.; Celli, I.; Bocciardi, R.; Pasini, B.; Ceccherini, I.; Lerone, M.; Kristoffersson, U.; Larsson, L. T.; Casasa, J. M.; Cass, D. T.; Abramowicz, M. J.; Vanderwinden, J.-M.; Kravcenkiene, I.; Baric, I.; Silengo, M.; Martucciello, G.; Romeo, G.: Frequency of RET mutations in long- and short-segment Hirschsprung disease. Hum. Mutat. 9: 243-249, 1997.
[7064] 1167. Takahashi, M.; Buma, Y.; Hiai, H.: Isolation of ret proto-oncogene cDNA with an amino-terminal signal sequence. Oncogene 4: 805-806, 1989.
[7065] 1168. Takahashi, M.; Buma, Y.; Iwamoto, T.; Inaguma, Y.; Ikeda, H.; Hiai, H.: Cloning and expression of the ret proto-oncogene encoding a tyrosine kinase with two potential transmembrane domains. Oncogene 3:571-578, 1988.
[7066] 1169. Takahashi, M.; Ritz, J.; Cooper, G. M.: Activation of a novel human transforming gene, ret, by DNA rearrangement. Cell 42: 581-588, 1985.
[7067] 1170. Tessitore, A.; Sinisi, A. A.; Pasquali, D.; Cardone, M.; Vitale, D.; Bellastella, A.; Colantuoni, V.: A novel case of multiple endocrine neoplasia type 2A associated with two de novo mutations of the RET protooncogene. J. Clin. Endocr. Metab. 84: 3522-3527, 1999.
[7068] 1171. van Heyningen, V.: One gene—four syndromes. Nature 367: 319-320, 1994.
[7069] 1172. Xue, F.; Yu, H.; Maurer, L. H.; Memoli, V. A.; Nutile-McMenemey, N.; Schuster, M. K.; Bowden, D. W.; Mao, J.; Noll, W. W.: Germline RET mutations in MEN 2A and FMTC and their detection by simple DNA diagnostic tests. Hum. Molec. Genet. 3: 635-638, 1994.
[7070] 1173. Yin, L.; Ceccherini, I.; Pasini, B.; Matera, I.; Bicocchi, M. P.; Barone, V.; Bocciardi, R.; Kaariainen, H.; Weber, D.; Devoto, M.; Romeo, G.: Close linkage with the RET protooncogene and boundaries of deletion mutations in autosomal dominant Hirschsprung disease. Hum. Molec. Genet. 2: 1803-1808, 1993.
[7071] 1174. Berger, A.; Rosenthal, D.; Spiegel, S.: Sphingosylphosphocholine, a signaling molecule which accumulates in Niemann-Pick disease type A, stimulates DNA-binding activity of the transcription activator protein AP-1. Proc. Nat. Acad. Sci. 92: 5885-5889, 1995.
[7072] 1175. Bohmann, D.; Bos, T. J.; Admon, A.; Nishimura, T.; Vogt, P. K.; Tjian, R.: Human proto-oncogene c-jun encodes a DNA binding protein with structural and functional properties of transcription factor AP-1. Science 238: 1386-1392, 1987.
[7073] 1176. Bos, T. J.; Bohmann, D.; Tsuchie, H.; Tjian, R.; Vogt, P. K.: v-jun encodes a nuclear protein with enhancer binding properties of AP-1. Cell 52: 705-712, 1988.
[7074] 1177. Haluska, F. G.; Huebner, K.; Isobe, M.; Nishimura, T.; Croce, C. M.; Vogt, P. K.: Localization of the human JUN protooncogene to chromosome region 1p31-32. Proc. Nat. Acad. Sci. 85: 2215-2218, 1988.
[7075] 1178. Hattori, K.; Angel, P.; Le Beau, M. M.; Karin, M.: Structure and chromosomal localization of the functional intronless human JUN protooncogene. Proc. Nat. Acad. Sci. 85: 9148-9152, 1988.
[7076] 1179. Lamph, W. W.; Wamsley, P.; Sassone-Corsi, P.; Verma, I. M.: Induction of proto-oncogene JUN/AP-1 by serum and TPA. Nature 334: 629-631, 1988.
[7077] 1180. Marx, J. L.: ‘Jun’ is bustin’ out all over. (Research News). Science 242:1377-1378, 1988.
[7078] 1181. Mattei, M. G.; Simon-Chazottes, D.; Hirai, S.-I.; Ryseck, R.-P.; Galcheva-Gargova, Z.; Guenet, J. L.; Mattei, J. F.; Bravo, R.; Yaniv, M.: Chromosomal localization of the three members of the jun proto-oncogene family in mouse and man. Oncogene 5: 151-156, 1990.
[7079] 1182. Shaulian, E.; Karin, M.: AP-1 as a regulator of cell life and death. Nature Cell Biol. 4: E131-E136, 2002.
[7080] 1183. Shaulian, E.; Schreiber, M.; Piu, F.; Beeche, M.; Wagner, E. F.; Karin, M.: The mammalian UV response: c-Jun induction is required for exit from p53-imposed growth arrest. Cell 103: 897-907, 2000.
[7081] 1184. Whyte, J. R. C.; Munro, S.: The Sec34/35 Golgi transport complex is related to the exocyst, defining a family of complexes involved in multiple steps of membrane traffic. Dev. Cell 1: 527-537, 2001.
[7082] 1185. Hoefler, G.; Forstner, M.; McGuinness, M. C.; Hulla, W.; Hiden, M.; Krisper, P.; Kenner, L.; Ried, T.; Lengauer, C.; Zechner, R.; mOser, H. W.; Chen, G. L.: cDNA cloning of the human peroxisomalenoyl-CoA hydratase: 3-hydroxyacyl-CoA dehydrogenase bifunctional enzyme and localization to chromosome 3q26.3-3q28: a free left Alu arm is inserted in the 3-prime noncoding region. Genomics 19: 60-67, 1994.
[7083] 1186. Nagle, D. L.; McGrail, S. H.; Vitale, J.; Woolf, E. A.; Dussault, B. J., Jr.; DiRocco, L.; Holmgren, L.; Montagno, J.; Bork, P.; Huszar, D.; Fairchild-Huntress, V.; Ge, P.; Keilty, J.; Ebelling, C.; Baldini, L.; Gilchrist, J.; Burr, P.; Carlson, G. A.; Moore, K. J.: The mahogany protein is a receptor involved in suppression of obesity. Nature 398:148-151, 1999.
[7084] 1187. Maas, S.; Gerber, A. P.; Rich, A.: Identification and characterization of a human tRNA-specific adenosine deaminase related to the ADAR family of pre-mRNA editing enzymes. Proc. Nat. Acad. Sci. 96: 8895-8900, 1999.
[7085] 1188. Zou, Y.-R.; Kottmann, A. H.; Kuroda, M.; Taniuchi, I.; Littman, D. R.: Function of the chemokine receptor CXCR4 in haematopoiesis and in cerebellar development. Nature 393: 595-599, 1998.
[7086] 1189. Apiou, F.; Flagiello, D.; Cillo, C.; Malfoy, B.; Poupon, M.-F.; Dutrillaux, B.: Fine mapping of human HOX gene clusters. Cytogenet. Cell Genet. 73: 114-115, 1996.
[7087] 1190. Brown, C. W.; Houston-Hawkins, D. E.; Woodruff, T. K.; Matzuk, M. M.: Insertion of Inhbb into the lnhba locus rescues the Inhba-null phenotype and reveals new activin functions. Nature Genet. 25: 453-457, 2000.
[7088] 1191. Ferguson, C. A.; Tucker, A. S.; Christensen, L.; Lau, A. L.; Matzuk, M. M.; Sharpe, P. T.: Activin is an essential early mesenchymal signal in tooth development that is required for patterning of the murine dentition. Genes Dev. 12: 2636-2649, 1998.
[7089] 1192. Burger, H. G.; Igarashi, M.; Baird, D.; Mason, T.; Bardin, W.; McLachlan, R.; Chappel, S.; Miyamoto, K.; de Jong, F.; Moudgal, A.; Demoulin, A.; Nieschlag, E.; de Kretser, D.; Robertson, D.; Findlay, J.; Sasamoto, S.; Forage, R.; Schwartz, N.; Fukuda, M.; Steinberger, A.; Hasegawa, Y.; Tanabe, K.; Ling, N.; Ying, S.-Y.: Inhibin: definition and nomenclature, including related substances. (Letter) J. Clin. Endocr. Metab. 66: 885-886, 1988.
[7090] 1193. Lumpkin, M. D.; Moltz, J. H.; Yu, W. H.; Samson, W. K.; McCann, S. M.: Purification of FSH-releasing factor: its dissimilarity from LHRH of mammalian, avian, and piscian origin. Brain Res. Bull. 18:175-178, 1987.
[7091] 1194. Matzuk, M. M.; Kumar, T. R.; Vassalli, A.; Bickenbach, J. R.; Roop, D. R.; Jaenisch, R.; Bradley, A.: Functional analysis of activins during mammalian development. Nature 374: 354-356, 1995.
[7092] 1195. Mellor, S. L.; Cranfield, M.; Ries, R.; Pedersen, J.; Cancilla, B.; de Kretser, D.; Groome, N. P.; Mason, A. J.; Risbridger, G. P.: Localization of activin beta(A)-, beta(B)-, and beta(C)-subunits in human prostate and evidence for formation of new activin heterodimers of beta(C)-subunit. J. Clin. Endocr. Metab. 85: 4851-4858, 2000.
[7093] 1196. Murata, M.; Eto, Y.; Shibai, H.; Sakai, M.; Muramatsu, M.: Erythroid differentiation factor is encoded by the same mRNA as that of the inhibin beta-A chain. Proc. Nat. Acad. Sci. 85: 2434-2438, 1988.
[7094] 1197. You, L.; Kruse, F. E.: Differential effect of activin A and BMP-7 on myofibroblast differentiation and the role of the Smad signaling pathway. Invest. Ophthal. Vis. Sci. 43: 72-81, 2002.
[7095] 1198. Dustin, M. L.; Olszowy, M. W.; Holdorf, A. D.; Li, J.; Bromley, S.; Desai, N.; Widder, P.; Rosenberger, F.; van der Merwe, P. A.; Allen, P. M.; Shaw, A. S.: A novel adaptor protein orchestrates receptor patterning and cytoskeletal polarity in T-cell contacts. Cell 94:667-677, 1998.
[7096] 1199. Kirsch, K. H.; Georgescu, M.-M.; Ishimaru, S.; Hanafusa, H.: CMS: an adapter molecule involved in cytoskeletal rearrangements. Proc. Nat. Acad. Sci. 96: 6211-6216, 1999.
[7097] 1200. Shih, N.-Y.; Li, J.; Karpitskii, V.; Nguyen, A.; Dustin, M. L.; Kanagawa, O.; Miner, J. H.; Shaw, A. S.: Congenital nephrotic syndrome in mice lacking CD2-associated protein. Science 286: 312-315, 1999.
[7098] 1201. Matsumoto-Taniura, N.; Pirollet, F.; Monroe, R.; Gerace, L.; Westendorf, J. M.: Identification of novel M phase phosphoproteins by expression cloning. Molec. Biol. Cell 7: 1455-1469, 1996.
[7099] 1202. Beckstead, R.; Ortiz, J. A.; Sanchez, C.; Prokopenko, S. N.; Chambon, P.; Losson, R.; Bellen, H. J.: Bonus, a Drosophila homolog of TIF1 proteins, interacts with nuclear receptors and can inhibit beta-FTZ-F1-dependent transcription. Molec. Cell 7: 753-765, 2001.
[7100] 1203. Le Douarin, B.; Zechel, C.; Garnier, J.-M.; Lutz, Y.; Tora, L.; Pierrat, B.; Heery, D.; Gronemeyer, H.; Chambon, P.; Losson, R.: The N-terminal part of TIF1, a putative mediator of the ligand-dependent activation function (AF-2) of nuclear receptors, is fused to B-rafin the oncogenic protein T18. EMBO J. 14: 2020-2033, 1995.
[7101] 1204. Thenot, S.; Henriquet, C.; Rochefort, H.; Cavailles, V.: Differential interaction of nuclear receptors with the putative human transcriptional coactivator hTIF1. J. Biol. Chem. 272: 12062-12068, 1997.
[7102] 1205. Feral, C.; Mattei, M. G.; Pawlak, A.; Guellaen, G.: Chromosomal localization of three human poly(A)-binding protein genes and four related pseudo genes. Hum. Genet. 105: 347-353, 1999.
[7103] 1206. Houng, A. K.; Maggini, L.; Clement, C. Y.; Reed, G. L.: Identification and structure of activated-platelet protein-1, a protein with RNA-binding domain motifs that is expressed by activated platelets. Europ. J. Biochem. 243: 209-218, 1997.
[7104] 1207. Yang, H.; Duckett, C. S.; Lindsten, T.: iPABP, an inducible poly(A)-binding protein detected in activated human T cells. Molec. Cell. Biol. 15:6770-6776, 1995.
[7105] 1208. Blagitko, N.; Schulz, U.; Schinzel, A. A.; Ropers, H.-H.; Kalscheuer, V. M.: Gamma-2-COP, a novel imprinted gene on chromosome 7q32, defines a new imprinting cluster in the human genome. Hum. Molec. Genet. 8:2387-2396, 1999.
[7106] 1209. Taylor, S. S.; Ha, E.; McKeon, F.: The human homologue of Bub3 is required for kinetochore localization of Bub1 and a Mad3/Bub1-related protein kinase. J. Cell Biol. 142: 1-11, 1998.
[7107] 1210. Bergstein, I.; Eisenberg, L. M.; Bhalerao, J.; Jenkins, N. A.; Copeland, N. G.; Osborne, M. P.; Bowcock, A. M.; Brown, A. M. C.: Isolation of two novel WNT genes, WNT14 and WNT15, one of which (WNT15) is closely linked to WNT3 on human chromosome 17q21. Genomics 46:450-458, 1997.
[7108] 1211. Hartman n, C.; Tabin, C. J.: Wnt-14 plays a pivotal role in inducing synovial joint formation in the developing appendicular skeleton. Cell 104:341-351, 2001.
[7109] 1212. Saitoh, T.; Hirai, M.; Katoh, M.: Molecular cloning and characterization of WNT3A and WNT14 clustered in human chromosome 1q42 region. Biochem. Biophys. Res. Commun. 284: 1168-1175, 2001.
[7110] 1213. Kullak-Ublick, G.-A.; Beuers, U.; Meier, P. J.; Domdey, H.; Paumgartner, G.: Assignment of the human organic anion transporting polypeptide (OATP) gene to chromosome 12p12 by fluorescence in situ hybridization. J. Hepatol. 25: 985-987, 1996.
[7111] 1214. Kullak-Ublick, G. A.; Hagenbuch, B.; Stieger, B.; Schteingart, C. D.; Hofmann, A. F.; Wolkoff, A. W.; Meier, P. J.: Molecular and functional characterization of an organic anion transporting polypeptide cloned from human liver.: Gastroenterology 109: 1274-1282, 1995.
[7112] 1215. Zheng, B.; Larkin, D. W.; Albrecht, U.; Sun, Z. S.; Sage, M.; Eichele, G.; Lee, C. C.; Bradley, A.: The mPer2 gene encodes a functional component of the mammalian circadian clock. Nature 400: 169-173, 1999.
[7113] 1216. Nakamura, H.; Sudo, T.; Tsuiki, H.; Miyake, H.; Morisaki, T.; Sasaki, J.; Masuko, N.; Kochi, M.; Ushio, Y.; Saya, H.: Identification of a novel human homolog of the Drosophila dig, P-dig, specifically expressed in the gland tissues and interacting with p55. FEBS Lett. 433: 63-67, 1998.
[7114] 1217. Funderburgh, J. L.; Perchellet, A. L.; Swiergiel, J.; Conrad, G. W.; Justice, M. J.: Keratocan (Kera), a corneal keratan sulfate proteoglycan, maps to the distal end of mouse chromosome 10. Genomics 52: 110-111, 1998.
[7115] 1218. Liu, C.-Y.; Shiraishi, A.; Kao, C. W.-C.; Converse, R. L.; Funderburgh, J. L.; Corpuz, L. M.; Conrad, G. W.; Kao, W. W.-Y.: The cloning of mouse keratocan cDNA and genomic DNA and the characterization of its expression during eye development. J. Biol. Chem. 273: 22584-22588, 1998.
[7116] 1219. Tasheva, E. S.; Funderburgh, J. L.; Funderburgh, M. L.; Corpuz, L. M.; Conrad, G. W.: Structure and sequence of the gene encoding human keratocan. DNA Seq. 10: 67-74, 1999.
[7117] 1220. Tasheva, E. S.; Pettenati, M.; Von Kap-Her, C.; Conrad, G. W.: Assignment of keratocan gene (KERA) to human chromosome band 12q22 by in situ hybridization. Cytogenet. Cell Genet. 88: 244-245, 2000.
[7118] 1221. Duncan, L. M.; Deeds, J.; Hunter, J.; Shao, J.; Holmgren, L. M.; Woolf, E. A.; Tepper, R. I.; Shyjan, A. W.: Down-regulation of the novel gene melastatin correlates with potential for melanoma metastasis. Cancer Res. 58: 1515-1520, 1998.
[7119] 1222. Fang, D.; Setaluri, V.: Expression and up-regulation of alternatively spliced transcripts of melastatin, a melanoma metastasis-related gene, in human melanoma cells. Biochem. Biophys. Res. Commun. 279: 53-61, 2000.
[7120] 1223. Hunter, J. J.; Shao, J.; Smutko, J. S.; Dussault, B. J.; Nagle, D. L.; Woolf, E. A.; Holmgren, L. M.; Moore, K. J.; Shyjan, A. W.: Chromosomal localization and genomic characterization of the mouse melastatin gene (Mlsn1). Genomics 54: 116-123, 1998.
[7121] 1224. Xu, X. Z.; Moebius, F.; Gill, D. L.; Montell, C.: Regulation of melastatin, a TRP-related protein, through interaction with a cytoplasmic isoform. Proc. Nat. Acad. Sci. 98: 10692-10697, 2001.
[7122] 1225. Kalitsis, P.; Earle, E.; Fowler, K. J.; Choo, K. H. A.: Bub3 gene disruption in mice reveals essential mitotic spindle checkpoint function during early embryogenesis. Genes Dev. 14: 2277-2282, 2000.
[7123] 1226. van Hille, B.; Richener, H.; Evans, D. B.; Green, J. R.; Bilbe, G.: Identification of two subunit A isoforms of the vacuolar H(+)-ATPase in human osteoclastoma. J. Biol. Chem. 268: 7075-7080, 1993.
[7124] 1227. van Hille, B.; Richener, H.; Green, J. R.; Bilbe, G.: The ubiquitous VA68 isoform of subunit A of the vacuolar H(+)-ATPase is highly expressed in human osteoclasts. Biochem. Biophys. Res. Commun. 214: 1108-1113, 1995.
[7125] 1228. Liang, T. W.; Chiu, H. H.; Gurney, A.; Sidle, A.; Tumas, D. B.; Schow, P.; Foster, J.; Klassen, T.; Dennis, K.; DeMarco, R. A.; Pham, T.; Frantz, G.; Fong, S.: Vascular endothelial-junctional adhesion molecule (VE-JAM)/JAM 2 interacts with T, NK, and dendritic cells through JAM 3. J. Immun. 168: 1618-1626, 2002.
[7126] 1229. Arrate, M. P.; Rodriguez, J. M.; Tran, T. T.; Brock, T. A.; Cunningham, S. A.: Cloning of human junctional adhesion molecule 3 (JAM3) and its identification as the JAM2 counter-receptor. J. Biol. Chem. 276:45826-45832, 2001.
[7127] 1230. Parker, A. E.; Van de Weyer, I.; Laus, M. C.; Verhasselt, P.; Luyten, W. H. M. L.: Identification of a human homologue of the Schizosaccharomyces pombe rad17+checkpoint gene. J. Biol. Chem. 273: 18340-18346,
[7128] 1998. Note: Erratum: J. Biol. Chem. 274: 24438-24439, 1999.
[7129] 1231. von Deimling, F.; Scharf, J. M.; Liehr, T.; Rothe, M.; Kelter, A.-R.; Albers, P.; Dietrich, W. F.; Kunkel, L. M.; Wernert, N.; Wirth, B.: Human and mouse RAD17 genes: identification, localization, genomic structure and histological expression pattern in normal testis and seminoma. Hum. Genet. 105: 17-27, 1999.
[7130] 1232. Thomas, M. K.; Yao, K.-M.; Tenser, M. S.; Wong, G. G.; Habener, J. F.: Bridge-1, a novel PDZ-domain coactivator of E2A-mediated regulation of insulin gene transcription. Molec. Cell. Biol. 19: 8492-8504, 1999.
[7131] 1233. Watanabe, T. K.; Saito, A.; Suzuki, M.; Fujiwara, T.; Takahashi, E.; Slaughter, C. A.; DeMartino, G. N.; Hendil, K. B.; Chung, C. H.; Tanahashi, N.; Tanaka, K.: cDNA cloning and characterization of a human proteasomal modulator subunit, p27 (PSMD9). Genomics 50: 241-250, 1998.
[7132] 1234. Fu, C.; Turck, C. W.; Kurosaki, T.; Chan, A. C.: BLNK: a central linker protein in B cell activation. Immunity 9: 93-103, 1998.
[7133] 1235. Ishiai, M.; Kurosaki, M.; Pappu, R.; Okawa, K.; Ronko, I.; Fu, C.; Shibata, M.; Iwamatsu, A.; Chan, A. C.; Kurosaki, T.: BLNK required for cloning Syk to PLC-gamma-2 and Rac1-JNK in B cells. Immunity 10:117-125, 1999.
[7134] 1236. Minegishi, Y.; Rohrer, J.; Coustan-Smith, E.; Lederman, H. M.; Pappu, R.; Campana, D.; Chan, A. C.; Conley, M. E.: An essential role for BLNK in human B cell development. Science 286: 1954-1957, 1999.
[7135] 1237. DeVry, C. G.; Clarke, S.: Assignment of the protein L-isoaspartate (D-aspartate) O-methyltransferase gene (PCMT1) to human chromosome bands 6q24-q25 with radiation hybrid mapping. Cytogenet. Cell Genet. 84:130-131, 1999.
[7136] 1238. Farrar, C.; Clarke, S.: Altered levels of S-adenosylmethionine and S-adenosylhomocysteine in the brains of L-isoaspartyl (D-aspartyl)O-methyltransferase-deficient mice. J. Biol. Chem. 277: 27856-27863, 2002.
[7137] 1239. Ingrosso, D.; Kagan, R. M.; Clarke, S.: Distinct C-terminal sequences of isozymes I and II of the human erythrocyte L-isoaspartyl/D-aspartyl protein methyltransferase. Biochem. Biophys. Res. Commun. 175: 351-358, 1991.
[7138] 1240. Kim, E.; Lowenson, J. D.; Clarke, S.; Young, S. G.: Phenotypic analysis of seizure-prone mice lacking L-isoaspartate (D-aspartate)O-methyltransferase. J. Biol. Chem. 274: 20671-20678, 1999.
[7139] 1241. Lowenson, J. D.; Kim, E.; Young, S. G.; Clarke, S.: Limited accumulation of damaged proteins in L-isoaspartyl (D-aspartyl) O-methyltransferase-deficient mice. J. Biol. Chem. 276: 20695-20702, 2001.
[7140] 1242. MacLaren, D. C.; Kagan, R. M.; Clarke, S.: Alternative splicing of the human isoaspartyl protein carboxyl methyltransferase leads to the generation of a C-terminal-RDEL sequence in isozyme II. Biochem. Biophys. Res. Commun. 185: 277-283, 1992.
[7141] 1243. MacLaren, D. C.; O'Connor, C. M.; Xia, Y.-R.; Mehrabian, M.; Klisak, I.; Sparkes, R. S.; Clarke, S.; Lusis, A. J.: The L-isoaspartyl/D-aspartyl protein methyltransferase gene (PCMT1) maps to human chromosome 6q22.3-6q24 and the syntenic region of mouse chromosome 10. Genomics 14: 852-856, 1992.
[7142] 1244. Ota, I. M.; Gilbert, J. M.; Clarke, S.: Two major isozymes of the protein D-aspartyl/L-isoaspartyl methyltransferase from human erythrocytes. Biochem. Biophys. Res. Commun. 151: 1136-1143, 1988.
[7143] 1245. Hunter, A. G. W.; Clifford, B.; Cox, D. M.: The characteristic physiognomy and tissue specific karyotype distribution in the Pallister-Killian syndrome. Clin. Genet. 28: 47-53, 1985.
[7144] 1246. Astrom, A.-K.; Voz, M. L.; Kas, K.; Roijer, E.; Wedell, B.; Mandahl, N.; Van de Ven, W.; Mark, J.; Stenman, G.: Conserved mechanism of PLAG1 activation in salivary gland tumors with and without chromosome 8q12 abnormalities: identification of SII as a new fusion partner gene. Cancer Res. 59: 918-923, 1999.
[7145] 1247. Singh, S.; Chao, L. Y.; Mishra, R.; Davies, J.; Saunders, G. F.: Missense mutation at the C-terminus of PAX6 negatively modulates homeodomain function. Hum. Molec. Genet. 10: 911-918, 2001.
[7146] 1248. Singh, S.; Mishra, R.; Arango, N. A.; Deng, J. M.; Behringer, R. R.; Saunders, G. F.: Iris hypoplasia in mice that lack the alternatively spliced Pax6(5a) isoform. Proc. Nat. Acad. Sci. 99: 6812-6815, 2002.
[7147] 1249. Singh, S.; Tang, H. K.; Lee, J.-Y.; Saunders, G. F.: Truncation mutations in the transactivation region of PAX6 result in dominant-negative mutants. J. Biol. Chem. 273: 21531-21541, 1998.
[7148] 1250. Ton, C. C. T.; Miwa, H.; Saunders, G. F.: Small eye (Sey): cloning and characterization of the murine homolog of the human aniridia gene. Genomics 13:251-256, 1992.
[7149] 1251. Walther, C.; Gruss, P.: Pax-6, a murine paired box gene, is expressed in the developing CNS. Development 113: 1435-1449, 1991.
[7150] 1252. Wawersik, S.; Maas, R. L.: Vertebrate eye development as modeled in Drosophila. Hum. Molec. Genet. 9: 917-925, 2000.
[7151] 1253. Lee, D. K.; George, S. R.; Cheng, R.; Nguyen, T.; Liu, Y.; Brown, M.; Lynch, K. R.; O'Dowd, B. F.: Identification of four novel human G protein-coupled receptors expressed in the brain. Molec. Brain Res. 86: 13-22, 2001.
[7152] 1254. Cikos, S.; Gregor, P.; Koppel, J.: Cloning of a novel biogenicamine receptor-like G protein-coupled receptor expressed in human brain. Biochim. Biophys. Acta 1521: 66-72, 2001.
[7153] 1255. Chen, C.-K.; Zhang, K.; Church-Kopish, J.; Huang, W.; Zhang, H.; Chen, Y.-J.; Frederick, J. M.; Baehr, W.: Characterization of human GRK7 as a potential cone opsin kinase. Molec. Vision 7: 305-313, 2001.
[7154] 1256. Weiss, E. R.; Ducceschi, M. H.; Horner, T. J.; Li, A.; Craft, C. M.; Osawa, S.: Species-specific differences in expression of G-protein-coupled receptor kinase (GRK) 7 and GRK1 in mammalian cone photoreceptor cells: implications for cone cell phototransduction. J. Neurosci. 21: 9175-9184, 2001.
[7155] 1257. Borregaard, N.; Cowland, J. B.: Granules of the human neutrophilic polymorphonuclear leukocyte. Blood 89: 3503-3521, 1997.
[7156] 1258. Chang, K. S.; Schroeder, W.; Siciliano, M. J.; Thompson, L. H.; McCredie, K.; Beran, M.; Freireich, E. J.; Liang, J. C.; Trujillo, J. M.; Stass, S. A.: The localization of the human myeloperoxidase gene is in close proximity to the translocation breakpoint in acute promyelocytic leukemia. Leukemia 1: 458-462, 1987.
[7157] 1259. DeLeo, F. R.; Goedken, M.; McCormick, S. J.; Nauseef, W. M.: A novel form of hereditary myeloperoxidase deficiency linked to endoplasmic reticulum/proteasome degradation. J. Clin. Invest. 101: 2900-2909, 1998.
[7158] 1260. Eiserich, J. P.; Baldus, S.; Brennan, M.-L.; Ma, W.; Zhang, C.; Tousson, A.; Castro, L.; Lusis, A. J.; Nauseef, W. M.; White, C. R.; Freeman, B. A.: Myeloperoxidase, a leukocyte-derived vascular NO oxidase. Science 296: 2391-2394, 2002.
[7159] 1261. Inazawa, J.; Inoue, K.; Nishigaki, H.; Tsuda, S.; Taniwaki, M.; Misawa, S.; Abe, T.: Assignment of the human myeloperoxidase gene (MPO) to bands q21.3-q23 of chromosome 17. Cytogenet. Cell Genet. 50:135-136, 1989.
[7160] 1262. Johnson, K.; Gemperlein, I.; Hudson, S.; Shane, S.; Rovera, G.: Complete nucleotide sequence of the human myeloperoxidase gene. Nucleic Acids Res. 17: 7985-7986, 1989.
[7161] 1263. Kizaki, M.; Miller, C. W.; Selsted, M. E.; Koeffler, H. P.: Myeloperoxidase (MPO) gene mutation in hereditary MPO deficiency. Blood 83: 1935-1940, 1994.
[7162] 1264. Klebanoff, S. J.: Myeloperoxidase. Proc. Assoc. Am. Physicians 111:383-389, 1999.
[7163] 1265. Kudoh, J.; Minoshima, S.; Hashinaka, K.; Nishio, C.; Yamada, M.; Shimizu, Y.; Shimizu, N.: Assignment of the myeloperoxidase gene MPO to human chromosome 17 using somatic cell hybrids and flow-sorted chromosomes. Jpn. J. Hum. Genet. 33: 315-324, 1988.
[7164] 1266. Kudoh, J.; Minoshima, S.; Hashinaka, K.; Nishio, C.; Yamada, M.; Shimizu, Y.; Shimizu, N.: Assignment of the myeloperoxidase (MPO) gene to human chromosome 17. (Abstract) Cytogenet. Cell Genet. 46:641-642, 1987.
[7165] 1267. Law, D. J.; Prasad, M. A.; King, S. E.; Spranger, K. D.; Lee, Y. H.; Fox, R. E.; Collins, E. E.; Gebuhr, T. C.; Miller, D. E.; Petty, E. M.: Localization of the human estrogen-responsive finger protein (EFP) gene (ZNF147) within a YAC contig containing the myeloperoxidase (MPO) gene. Genomics 28: 361-363, 1995.
[7166] 1268. Antonarakis, S. E.: Personal Communication. Baltimore, Md. Mar. 25, 2002.
[7167] 1269. McKemy, D. D.; Neuhausser, W. M.; Julius, D.: Identification of a cold receptor reveals a general role for TRP channels in thermosensation. Nature 416:52-58, 2002.
[7168] 1270. Peier, A. M.; Moqrich, A.; Hergarden, A. C.; Reeve, A. J.; Andersson, D. A.; Story, G. M.; Earley, T. J.; Dragoni, I.; McIntyre, P.; Bevan, S.; Patapoutian, A.: A TRP channel that senses cold stimuli and menthol. Cell 108:705-715, 2002.
[7169] 1271. Ashery-Padan, R.; Marquardt, T.; Zhou, X.; Gruss, P.: Pax6 activity in the lens primordium is required for lens formation and for correct placement of a single retina in the eye. Genes Dev. 14: 2701-2711, 2000.
[7170] 1272. Azuma, N.; Yamaguchi, Y.; Handa, H.; Hayakawa, M.; Kanai, A.; Yamada, M.: Missense mutation in the alternative splice region of the PAX6 gene in eye anomalies. Am. J. Hum. Genet. 65: 656-663, 1999.
[7171] 1273. Roginski, R. S.; Mohan Raj, B. K.; Finkernagel, S. W.; Sciorra, L. J.: Assignment of an ionotropic glutamate receptor-like gene (GRINL1A) to human chromosome 15q22.1 by in situ hybridization. Cytogenet. Cell Genet. 93: 143-144, 2001.
[7172] 1274. Wydner, K. S.; Mohan Raj, B. K.; Sciorra, L. J.; Roginski, R. S.: The mouse orthologue of the human ionotropic glutamate receptor-like gene (GRINL1A) maps to mouse chromosome 9. Cytogenet. Cell Genet. 95:240-241, 2001.
[7173] 1275. Nakamura, T.; Yamazaki, Y.; Saiki, Y.; Moriyama, M.; Largaespada, D. A.; Jenkins, N. A.; Copeland, N. G.: Evi9 encodes a novel zinc finger protein that physically interacts with BCL6, a known human B-cell proto-oncogene product. Molec. Cell Biol. 20: 3178-3186, 2000.
[7174] 1276. Saiki, Y.; Yamazaki, Y.; Yoshida, M.; Katoh, O.; Nakamura, T.: Human EVI9, a homologue of the mouse myeloid leukemia gene, is expressed in the hematopoietic progenitors and down-regulated during myeloid differentiation of HL60 cells. Genomics 70: 387-391, 2000.
[7175] 1277. Satterwhite, E.; Sonoki, T.; Willis, T. G.; Harder, L.; Nowak, R.; Arriola, E. L.; Liu, H.; Price, H. P.; Gesk, S.; Steinemann, D.; Schlegelberger, B.; Oscier, D. G.; Siebert, R.; Tucker, P. W.; Dyer, M. J. S.: The BCL11 gene family: involvement of BCL11A in lymphoid malignancies. Blood 98: 3413-3420, 2001.
[7176] 1278. Le Beau, M. M.; Lemons, R. S.; Rosner, G. L.; Carrino, J. C.; Reid, M. S.; Chisholm, R. L.; Diaz, M. O.; Weil, S. C.: Chromosomal localization of the gene encoding myeloperoxidase. (Abstract) Cytogenet. Cell Genet. 46: 645, 1987.
[7177] 1279. Richardson, J.; Cvekl, A.; Wistow, G.: Pax-6 is essential for lens-specific expression of zeta-crystallin. Proc. Nat. Acad. Sci. 92:4676-4680, 1995.
[7178] 1280. Sander, M.; Neubuser, A.; Kalamaras, J.; Ee, H. C.; Martin, G. R.; German, M. S.: Genetic analysis reveals that PAX6 is required for normal transcription of pancreatic hormone genes and islet development. Genes Dev. 11: 1662-1673, 1997.
[7179] 1281. Davis, A.; Cowell, J. K.: Mutations in the PAX6 gene in patients with hereditary aniridia. Hum. Molec. Genet. 2: 2093-2097, 1993.
[7180] 1282. Gronskov, K.; Rosenberg, T.; Sand, A.; Brondum-Nielsen, K.: Mutational analysis of PAX6: 16 novel mutations including 5 missense mutations with a mild aniridia phenotype. Europ. J. Hum. Genet. 7: 274-286, 1999.
[7181] 1283. Halder, G.; Callaerts, P.; Gehring, W. J.: Induction of ectopic eyes by targeted expression of the eyeless gene in Drosophila. Science 267:1788-1792, 1995.
[7182] 1284. Hanson, I.; Brown, A.; van Heyningen, V.: A new PAX6 mutation in familial aniridia. J. Med. Genet. 32: 488-489, 1995.
[7183] 1285. Hanson, I.; Van Heyningen, V.: Pax6: more than meets the eye. Trends Genet. 11: 268-272, 1995.
[7184] 1286. Hanson, I. M.; Fletcher, J. M.; Jordon, T.; Brown, A.; Taylor, D.; Adams, R. J.; Punnett, H. H.; van Heyningen, V.: Mutations atthe PAX6 locus are found in heterogeneous anterior segment malformations including Peters' anomaly. Nature Genet. 6: 168-173, 1994.
[7185] 1287. Heins, N.; Malatesta, P.; Cecconi, F.; Nakafuku, M.; Tucker, K. L.; Hack, M. A.; Chapouton, P.; Barde, Y.-A.; Gotz, M.: Glial cells generate neurons: the role of the transcription factor Pax6. Nature Neurosci. 5: 308-315, 2002.
[7186] 1288. Holmstrom, G. E.; Reardon, W. P.; Baraitser, M.; Elston, J. S.; Taylor, D. S.: Heterogeneity in dominant anterior segment malformations. Brit. J. Ophthal. 75: 591-597, 1991.
[7187] 1289. Kioussi, C.; O'Connell, S.; St-Onge, L.; Treier, M.; Gleiberman, A. S.; Gruss, P.; Rosenfeld, M. G.: Pax6 is essential for establishing ventral-dorsal cell boundaries in pituitary gland development. Proc. Nat. Acad. Sci. 96: 14378-14382, 1999.
[7188] 1290. Kleinjan, D. A.; Seawright, A.; Schedl, A.; Quinlan, R. A.; Danes, S.; van Heyningen, V.: Aniridia-associated translocations, DNase hypersensitivity, sequence comparison and transgenic analysis redefine the functional domain of PAX6. Hum. Molec. Genet. 10: 2049-2059, 2001.
[7189] 1291. Lauderdale, J. D.; Wilensky, J. S.; Oliver, E. R.; Walton, D. S.; Glaser, T.: 3-prime deletions cause aniridia by preventing PAX6 gene expression. Proc. Nat. Acad. Sci. 97: 13755-13759, 2000.
[7190] 1292. Marquardt, T.; Ashery-Padan, R.; Andrejewski, N.; Scardigli, R.; Guillemot, F.; Gruss, P.: Pax6 is required for the multipotent state of retinal progenitor cells. Cell 105: 43-55, 2001.
[7191] 1293. Bentz, H.; Nathan, R. M.; Rosen, D. M.; Armstrong, R. M.; Thompson, A. Y.; Segarini, P. R.; Mathews, M. C.; Dasch, J. R.; Piez, K. A.; Seyedin, S. M.: Purification and characterization of a unique osteoinductive factor from bovine bone. J. Biol. Chem. 264: 20805-20810, 1989.
[7192] 1294. Madisen, L.; Neubauer, M.; Plowman, G.; Rosen, D.; Segarini, P.; Dasch, J.; Thompson, A.; Ziman, J.; Bentz, H.; Purchio, A. F.: Molecular cloning of a novel bone-forming compound: osteoinductive factor. DNA Cell Biol. 9: 303-309, 1990.
[7193] 1295. Chen, H.; Antonarakis, S. E.: The SH3D1A gene maps to human chromosome 21q22.1-q22.2. Cytogenet. Cell Genet. 78: 213-215, 1997.
[7194] 1296. Pucharcos, C.; Estivill, X.; de la Luna, S.: Intersectin 2, anew multimodular protein involved in clathrin-mediated endocytosis. FEBS Lett. 478: 43-51, 2000.
[7195] 1297. Gibbons, B.; Scott, D.; Hungerford, J. L.; Cheung, K. L.; Harrison, C.; Attard-Montalto, S.; Evans, M.; Birch, J. M.; Kingston, J. E.: Retinoblastoma in association with the chromosome breakage syndromes Fanconi's anaemia and Bloom's syndrome: clinical and cytogenetic findings. Clin. Genet. 47: 311-317, 1995.
[7196] 1298. Girardet, A.; McPeek, M. S.; Leeflang, E. P.; Munier, F.; Arnheim, N.; Claustres, M.; Pellestor, F.: Meiotic segregation analysis of RB1 alleles in retinoblastoma pedigrees by use of single-sperm typing. Am. J. Hum. Genet. 66: 167-175, 2000.
[7197] 1299. Godbout, R.; Dryja, T. P.; Squire, J.; Gallie, B. L.; Phillips, R. A.: Somatic inactivation of genes on chromosome 13 is a common event in retinoblastoma. Nature 304: 451-453, 1983.
[7198] 1300. Goodrich, D. W.; Wang, N. P.; Qian, Y.-W.; Lee, E. Y.-H. P.; Lee, W.-H.: The retinoblastoma gene product regulates progression through the G1 phase of the cell cycle. Cell 67: 293-302, 1991.
[7199] 1301. Grace, E.; Drennan, J.; Colver, D.; Gordon, R. R.: The 13q deletion syndrome. J. Med. Genet. 8: 351-357, 1971.
[7200] 1302. Green, A. R.; Wyke, J. A.: Anti-oncogenes: a subset of regulatory genes involved in carcinogenesis? Lancet II: 475-477, 1985.
[7201] 1303. Greger, V.; Kerst, S.; Messmer, E.; Hopping, W.; Passarge, E.; Horsthemke, B.: Application of linkage analysis to genetic counselling in families with hereditary retinoblastoma. J. Med. Genet. 25: 217-221, 1988.
[7202] 1304. Greger, V.; Passarge, E.; Horsthemke, B.: Somatic mosaicism in a patient with bilateral retinoblastoma. Am. J. Hum. Genet. 46:1187-1193, 1990.
[7203] 1305. Hagstrom, S. A.; Dryja, T. P.: Mitotic recombination map of 13cen-13q14 derived from an investigation of loss of heterozygosity in retinoblastomas. Proc. Nat. Acad. Sci. 96: 2952-2957, 1999.
[7204] 1306. Hall, J. G.: Personal Communication. Vancouver, British Columbia, Canada May 29, 1993.
[7205] 1307. Hanahan, D.; Weinberg, R. A.: The hallmarks of cancer. Cell 100:57-70, 2000.
[7206] 1308. Harbour, J. W.: Molecular basis of low-penetrance retinoblastoma. Arch. Ophthal. 119: 1699-1704, 2001.
[7207] 1309. Harbour, J. W.; Lai, S.-L.; Whang-Peng, J.; Gazdar, A. F.; Minna, J. D.; Kaye, F. J.: Abnormalities in structure and expression of the human retinoblastoma gene in SCLC. Science 241: 353-357, 1988.
[7208] 1310. Hensel, C.; Hsieh, C.-L.; Lee, W.-H.; Pam-Lee, E.; Gazdar, A.; Sakaguchi, A. Y.; Naylor, S. L.: Allele loss and lack of expression of the RB-1 locus in small cell lung cancer. (Abstract) Am. J. Hum. Genet. 43: A25, 1988.
[7209] 1311. Henson, J. W.; Schnitker, B. L.; Correa, K. M.; von Diemling, A.; Fassbender, F.; Xu, H.-J.; Benedict, W. F.; Yandell, D. W.; Louis, D. N.: The retinoblastoma gene is involved in malignant progression of astrocytomas. Ann. Neurol. 36: 714-721, 1994.
[7210] 1312. Higgins, M. J.; Hansen, M. F.; Cavenee, W. K.; Lalande, M.: Molecular detection of chromosomal translocations that disrupt the putative retinoblastoma susceptibility locus. Molec. Cell. Biol. 9: 1-5, 1989.
[7211] 1313. Hoegerman, S. F.: Chromosome 13 long arm interstitial deletion may result from maternal inverted insertion. Science 205: 1035-1036, 1979.
[7212] 1314. Hogg, A.; Bia, B.; Onadim, Z.; Cowell, J. K.: Molecular mechanisms of oncogenic mutations in tumours from patients with bilateral and unilateral retinoblastoma. Proc. Nat. Acad. Sci. 90: 7351-7355, 1993.
[7213] 1315. Honavar, S. G.; Shields, C. L.; Shields, J. A.; Demirci, H.; Naduvilath, T. J.: Intraocular surgery after treatment of retinoblastoma. Arch. Ophthal. 119: 1613-1621, 2001.
[7214] 1316. Honavar, S. G.; Singh, A. D.; Shields, C. L.; Meadows, A. T.; Demirci, H.; Cater, J.; Shields, J. A.: Postenucleation adjuvant therapy in high-risk retinoblastoma. Arch. Ophthal. 120: 923-931, 2002.
[7215] 1317. Hong, F. D.; Huang, H.-J. S.; To, H.; Young, L.-J. S.; Oro, A.; Bookstein, R.; Lee, E. Y.-H. P.; Lee, W.-H.: Structure of the human retinoblastoma gene. Proc. Nat. Acad. Sci. 86: 5502-5506, 1989.100. Horowitz, J. M.; Park, S.-H.; Bogenmann, E.; Cheng, J.-C.; Yandell, D. W.; Kaye, F. J.; Minna, J. D.; Dryja, T. P.; Weinberg, R. A.: Frequent inactivation of the retinoblastoma anti-oncogene is restricted to a subset of human tumor cells. Proc. Nat. Acad. Sci. 87: 2775-2779, 1990.101. Horowitz, J. M.; Park, S. H.; Yandell, D. W.; Weinberg, R. A.: Involvement of the retinoblastoma gene in the genesis of various human tumors: In: Kavenee, W.; Hastie, N.; Stanbridge, E.: Recessive oncogenes and Tumor Suppression: Current Communications in Molecular Biology. Cold Spring Harbor, N. Y.: Cold Spring Harbor Laboratory Press (pub.) 1989. Pp. 101-108.102. Horsthemke, B.; Greger, V.; Barnert, H. J.; Hopping, W.; Passarge, E.: Detection of submicroscopic deletions and a DNA polymorphism at the retinoblastoma locus. Hum. Genet. 76: 257-261, 1987.103. Horsthemke, B.; Greger, V.; Becher, R.; Passarge, E.: Mechanism of i(6p) formation in retinoblastoma tumor cells. Cancer Genet. Cytogenet. 37:95-102, 1989.104. Hsieh, J.-K.; Chan, F. S. G.; O'Connor, D. J.; Mittnacht, S.; Zhong, S.; Lu, X.: RB regulates the stability and the apoptotic function of p53 via MDM2. Molec. Cell 3: 181-193, 1999.105. Huang, H.-J. S.; Yee, J.-K.; Shew, J.-Y.; Chen, P.-L.; Bookstein, R.; Friedmann, T.; Lee, E. Y.-H. P.; Lee, W.-H.: Suppression of the-neoplastic phenotype by replacement of the RB gene in human cancer cells. Science 242: 1563-1566, 1988.106. Janson, M.; Nordenskjold, M.: A constitutional mutation within the retinoblastoma gene detected by PFGE. Clin. Genet. 45: 5-10, 1994.107. Jensen, R. D.; Miller, R. W.: Retinoblastoma: epidemiologic characteristics. New Eng. J. Med. 285: 307-311, 1971.108. Kimchi, A.; Wang, X.-F.; Weinberg, R. A.; Cheifetz, S.; Massague, J.: Absence of TGF-beta receptors and growth inhibitory responses in retinoblastoma cells. Science 240: 196-199, 1988.109. Kitchin, F. D.; Ellsworth, R. M.: Pleiotropic effects of the-gene for retinoblastoma. J. Med. Genet. 11: 244-246, 1974.110. Kivela, T.: Trilateral retinoblastoma: a meta-analysis of hereditary retinoblastoma associated with primary ectopic intracranial retinoblastoma. J. Clin. Oncol. 17: 1829-1837, 1999.111. Kivela, T.; Asko-Seljavaara, S.; Pihkala, U.; Hovi, L.; Heikkonen, J.: Sebaceous carcinoma of the eyelid associated with retinoblastoma. Ophthalmology 108:1124-1128, 2001.112. Klutz, M.; Brockmann, D.; Lohmann, D. R.: A parent-of-origin effect in two families with retinoblastoma is associated with a distinct splice mutation in the RB1 gene. Am. J. Hum. Genet. 71: 174-179, 2002.113. Knight, L. A.; Gardner, H. A.; Gallie, B. L.: Familial retinoblastoma: segregation of chromosome 13 in four families. Am. J. Hum. Genet. 32:194-201, 1980.114. Knudson, A. G.: Hereditary cancer, oncogenes and anti-oncogenes. Cancer Res. 45: 1437-1443, 1985.115. Knudson, A. G., Jr.: Mutation and cancer: statistical study of retinoblastoma. Proc. Nat. Acad. Sci. 68: 820-823, 1971.116. Knudson, A. G., Jr.: Genetics of human cancer. Annu. Rev. Genet. 20:231-251, 1986.117. Knudson, A. G., Jr.; Hethcote, H. W.; Brown, B. W.: Mutation and childhood cancer: a probabilistic model for the incidence of retinoblastoma. Proc. Nat. Acad. Sci. 72: 5116-5120, 1975.118. Knudson, A. G., Jr.; Meadows, A. T.; Nichols, W. W.; Hill, R.: Chromosomal deletion and retinoblastoma. New Eng. J. Med. 295:1120-1123, 1976.119. Laquis, S. J.; Rodriguez-Galindo, C.; Wilson, M. W.; Fleming, J. C.; Haik, B. G.: Retinoblastoma in a patient with an X; 13 translocation and facial abnormalities consistent with 13q-syndrome. Am. J. Ophthal. 133:285-287, 2002.120. Lee, W.-H.; Bookstein, R.; Hong, F.; Young, L.-J.; Shew, J.-Y.; Lee, E. Y.-H. P.: Human retinoblastoma susceptibility gene: cloning, identification, and sequence. Science 235: 1394-1399, 1987.121. Lee, W.-H.; Shew, J.-Y.; Hong, F. D.; Sery, T. W.; Donoso, L. A.; Young, L.-J.; Bookstein, R.; Lee, E. Y.-H. P.: The retinoblastoma susceptibility gene encodes a nuclear phosphoprotein associated with DNA binding activity. Nature 329: 642-645, 1987.122. Lele, K. P.; Penrose, L. S.; Stallard, H. B.: Chromosome deletion in a case of retinoblastoma. Ann. Hum. Genet. 27: 171-174, 1963.123. Lemieux, N.; Messier, P. E.; Jacob, J. L.; Milot, J.; Richer, C. L.: Precise cytogenetic localization of the Rb locus at subband 13q14.11 by ultra-structural detection after immunochemical chromosome banding. (Abstract) Am. J. Hum. Genet. 45 (suppl.): A27, 1989.124. Liu, Z.; Song, Y.; Bia, B.; Cowell, J. K.: Germline mutations in the RB1 gene in patients with hereditary retinoblastoma. Genes Chromosomes Cancer 14: 277-284, 1995.125. Lohmann, D. R.; Brandt, B.; Hopping, W.; Passarge, E.; Horsthemke, B.: Spectrum of small length germline mutations in the RB1 gene. Hum. Molec. Genet. 3: 2187-2193, 1994.126. Lohmann, D. R.; Brandt, B.; Hopping, W.; Passarge, E.; Horsthemke, B.: The spectrum of RB1 germ-line mutations in hereditary retinoblastoma. Am. J. Hum. Genet. 58: 940-949, 1996.127. Lohmann, D. R.; Gerick, M.; Brandt, B.; Oelschlager, U.; Lorenz, B.; Passarge, E.; Horsthemke, B.: Constitutional RB1-gene mutations in patients with isolated unilateral retinoblastoma. Am. J. Hum. Genet. 61: 282-294, 1997.128. Lomazzi, M.; Moroni, M. C.; Jensen, M. R.; Frittoli, E.; Helin, K.: Suppression of the p53- or pRB-mediated G1 checkpoint is required for E2F-induced S-phase entry. Nature Genet 31: 190-194, 2002.129. Lueder, G. T.; Judisch, G. F.; Wen, B.-C.: Heritable retinoblastoma and pinealoma. Arch. Ophthal. 109: 1707-1709, 1991.130. Luo, R. X.; Postigo, A. A.; Dean, D. C.: Rb interacts with histone deacetylase to repress transcription. Cell 92: 463-473, 1998.131. Maat-Kievit, J. A.; Oepkes, D.; Hartwig, N. G.; Vermeij-Keers, C.; van Kamp, I. L.; van de Kamp, J. J. P.: A large retinoblastoma detected in a fetus at 21 weeks of gestation. Prenatal Diag. 13:377-384, 1993.132. MacKay, C. J.; Abramson, D. H.; Ellsworth, R. M.: Metastatic patterns of retinoblastoma. Arch. Ophthal. 102: 391-396, 1984.133. Macklin, M. T.: A study of retinoblastoma in Ohio. Am. J. Hum. Genet. 12: 1-43, 1960.134. Macklin, M. T.: Inheritance of retinoblastoma in Ohio. Arch. Ophthal. 62: 842-851, 1959.135. Manchester, P. T., Jr.: Retinoblastoma among offspring of adult survivors. Arch. Ophthal. 65: 546-549, 1961.136. Mancini, D.; Singh, S.; Ainsworth, P.; Rodenhiser, D.: Constitutively methylated CpG dinucleotides as mutation hot spots in the retinoblastoma gene (RB1). Am. J. Hum. Genet. 61: 80-87, 1997.137. Mancini, M. A.; Shan, B.; Nickerson, J. A.; Penman, S.; Lee, W.-H.: The retinoblastoma gene product is a cell cycle-dependent, nuclear matrix-associated protein. Proc. Nat. Acad. Sci. 91: 418-422, 1994.138. Marino, S.; Vooijs, M.; van der Gulden, H.; Jonker, J.; Berns, A.: Induction of medulloblastomas in p53-null mutant mice by somatic inactivation of Rb in the external granular layer cells of the cerebellum. Genes Dev. 14: 994-1004, 2000.139. Matsunaga, E.: Recurrence risks to relatives of patients with retinoblastoma. Jpn. J. Ophthal. 22: 313-319, 1978.140. Matsunaga, E.: Almost synchronous appearance of bilateral retinoblastomas. (Letter) Am. J. Med. Genet. 11: 485-487, 1982.141. Matsunaga, E.: Retinoblastoma: mutational mosaicism or hostresistance? Am. J. Med. Genet. 8: 375-387, 1981.142. Matsunaga, E.: Hereditary retinoblastoma: host resistance and second primary tumors. J. Nat. Cancer Inst. 65: 47-51, 1980.143. Matsunaga, E.: Hereditary retinoblastoma: delayed mutation or host resistance? Am. J. Hum. Genet. 30: 406-425, 1978.144. Matsunaga, E.; Minoda, K.; Sasaki, M. S.: Parental age and seasonal variation in the births of children with sporadic retinoblastoma: a mutation-epidemiologic study. Hum. Genet. 84: 155-158, 1990.145. Michalova, K.; Kloucek, F.; Musilova, J.: Deletion of 13q in two patients with retinoblastoma, one probably due to 13q-mosaicismin the mother. Hum. Genet. 61: 264-266, 1982.146. Moll, A. C.; Imhof, S. M.; Schouten-Van Meeteren, A. Y. N.; Kuik, D. J.; Hofman, P.; Boers, M.: Second primary tumors in hereditary retinoblastoma: a register-based study, 1945-1997. Is there an age effect on radiation-related risk? Ophthalmology 108: 1109-1114, 2001.147. Motegi, T.: Lymphocyte chromosome survey in 42 patients with retinoblastoma: effort to detect 13q14 deletion mosaicism. Hum. Genet. 58:168-173, 1981.148. Motegi, T.: High rate of detection of 13q14 deletion mosaicism among retinoblastoma patients (using more extensive methods). Hum. Genet. 61: 95-97, 1982.149. Motegi, T.; Kaga, M.; Yanagawa, Y.; Kadowaki, H.; Watanabe, K.; Inoue, A.; Komatsu, M.; Minoda, K.: A recognizable pattern of the midface of retinoblastoma patients with interstitial deletion of 13q. Hum. Genet. 64: 160-162, 1983.150. Motegi, T.; Komatsu, M.; Minoda, K.: Is the interstitial deletion of 13q in retinoblastoma patients not transmissible? (Letter) Hum. Genet. 64: 205, 1983.151. Motegi, T.; Komatsu, M.; Nakazato, Y.; Ohuchi, M.; Minoda, K.: Retinoblastoma in a boy with a de novo mutation of a 13/18 translocation: the assumption that the retinoblastoma locus is at 13q141, particularly at the distal portion of it. Hum. Genet. 60: 193-195, 1982.152. Munier, F.; Spence, M. A.; Pescia, G.; Balmer, A.; Gailloud, C.; Thonney, F.; van Melle, G.; Rutz, H. P.: Paternal selection favoring mutant alleles of the retinoblastoma susceptibility gene. Hum. Genet. 89:508-512, 1992.153. Munier, F. L.; Wang, M. X.; Spence, M. A.; Thonney, F.; Balmer, A.; Pescia, G.; Donoso, L. A.; Murphree, A. L.: Pseudo low penetrancein retinoblastoma: fortuitous familial aggregation of sporadic cases caused by independently derived mutations in two large pedigrees. Arch. Ophthal. 111: 1507-1511, 1993.154. Murphree, A. L.; Benedict, W. F.: Retinoblastoma: clues to human oncogenesis. Science 223: 1028-1033, 1984.155. Naumova, A.; Hansen, M.; Strong, L.; Jones, P. A.; Hadjistilianou, D.; Mastrangelo, D.; Griegel, S.; Rajewsky, M. F.; Shields, J.; Donoso, L.; Wang, M.; Sapienza, C.: Concordance between parental origin of chromosome 13q loss and chromosome 6p duplication in sporadic retinoblastoma. Am. J. Hum. Genet. 54: 274-281, 1994.156. Naumova, A.; Sapienza, C.: The genetics of retinoblastoma, revisited. Am. J. Hum. Genet. 54: 264-273, 1994.157. Nevins, J. R.: The Rb/E2F pathway and cancer. Hum. Molec. Genet. 10:699-703, 2001.158. Nichols, W. W.; Miller, R. C.; Sobel, M.; Hoffman, E.; Sparkes, R. S.; Mohandas, T.; Veomett, I.; Davis, J. R.: Further observations on a 13qXp translocation associated with retinoblastoma. Am. J. Ophthal. 89:621-627, 1980.159. Nielsen, S. J.; Schneider, R.; Bauer, U.-M.; Bannister, A. J.; Morrison, A.; O'Carroll, D.; Firestein, R.; Cleary, M.; Jenuwein, T.; Herrera, R. E.; Kouzarides, T.: Rb targets histone H3 methylation and HP1 to promoters. Nature 412: 561-565, 2001.160. Nirankari, M. S.; Gulati, G. C.; Chaddah, M. R.: Retinoblastoma: genetics and report of a family. Am. J. Ophthal. 53: 523-532, 1962.161. Noorani, H. Z.; Khan, H. N.; Gallie, B. L.; Detsky, A. S.: Cost comparison of molecular versus conventional screening of relatives at risk for retinoblastoma. Am. J. Hum. Genet. 59: 301-307, 1996.162. Nussbaum, R.; Puck, J.: Recurrence risks for retinoblastoma: a model for autosomal dominant disorders with complex inheritance. J. Pediat. Ophthal. 13: 89-98, 1976.163. Onadim, Z.; Hogg, A.; Baird, P. N.; Cowell, J. K.: Oncogenic point mutations in exon 20 of the RB1 gene in families showing incomplete penetrance and mild expression of the retinoblastoma phenotype. Proc. Nat. Acad. Sci. 89: 6177-6181, 1992.164. Onadim, Z.; Woolford, A. J.; Kingston, J. E.; Hungerford, J. L.: The RB1 gene mutation in a child with ectopic intracranial retinoblastoma. Brit. J. Cancer 76: 1405-1409, 1997.165. Ono, T.; Yoshida, M. C.: Chromosomal assignment of retinoblastomal gene (RB1) to mouse 14D3 and rat 15q12 by fluorescence in situ hybridization. Jpn. J. Genet. 68: 617-621, 1993.166. Orye, E.; Benoit, Y.; Coppieters, R.; Jeannin, P.; Vercruysse, C.; Delaey, J.; Delbeke, M.-J.: A case of retinoblastoma, associated with histiocytosis-X and mosaicism of a deleted D-group chromosome (13q-14-q31). Clin. Genet. 22: 37-39, 1982.167. Orye, E.; Delbeke, M. J.; Vandenabeele, B.: Retinoblastoma and long arm deletion of chromosome 13. Attempts to define the deleted segment. Clin. Genet. 5: 457-464, 1974.168. Orye, E.; Delbeke, M. J.; Vandenabeele, B.: Retinoblastoma and D-chromosome deletions. (Letter) Lancet II: 1376, 1971.169. Otterson, G. A.; Modi, S.; Nguyen, K.; Coxon, A. B.; Kaye, F. J.: Temperature-sensitive RB mutations linked to incomplete penetrance of familial retinoblastoma in 12 families. Am. J. Hum. Genet. 65:1040-1046, 1999.170. Otterson, G. W.; Chen, W.; Coxon, A. B.; Khleif, S. N.; Kaye, F. J.: Incomplete penetrance of familial retinoblastoma linked to germ-line mutations that result in partial loss of RB function. Proc. Nat. Acad. Sci. 94: 12036-12040, 1997.171. Pendergrass, T. W.; Davis, S.: Incidence of retinoblastoma in the United States. Arch. Ophthal. 98: 1204-1210, 1980.172. Pennaneach, V.; Salles-Passador, I.; Munshi, A.; Brickner, H.; Regazzoni, K.; Dick, F.; Dyson, N.; Chen, T.-T.; Wang, J. Y. J.; Fotedar, R.; Fotedar, A.: The large subunit of replication factor C promotes cell survival after DNA damage in an LxCxE motif- and Rb-dependent manner. Molec. Cell 7: 715-727, 2001.173. Riccardi, V. M.; Hittner, H. M.; Francke, U.; Pippin, S.; Holmquist, G. P.; Kretzer, F. L.; Ferrell, R.: Partial triplication and deletion of 13q: study of a family presenting with bilateral retinoblastomas. Clin. Genet. 15: 332-345, 1979.174. Rivera, H.; Turleau, C.; de Grouchy, J.; Junien, C.; Despoisse, S.; Zucker, J.-M.: Retinoblastoma-del(13q14): report of two patients, one with a trisomic sib due to maternal insertion; gene dosage effect for esterase D. Hum. Genet. 59: 211-214, 1981.175. Sakai, T.; Ohtani, N.; McGee, T. L.; Robbins, P. D.; Dryja, T. P.: Oncogenic germ-line mutations in Sp1 and ATF sites in the human retinoblastoma gene. Nature 353: 83-86, 1991.176. Sakai, T.; Ohtani, N.; McGee, T. L.; Robbins, P. D.; Dryja, T. P.: Oncogenic germ-line mutations in Sp1 and ATF sites in the human retinoblastoma gene. Nature 353: 83-86, 1991.177. Sakai, T.; Toguchida, J.; Ohtani, N.; Yandell, D. W.; Rapaport, J. M.; Dryja, T. P.: Allele-specific hypermethylation of the retinoblastoma tumor-suppressor gene. Am. J. Hum. Genet. 48: 880-888, 1991.178. Schappert-Kimmijser, J.; Hemmes, G. D.; Nijland, R.: The heredity of retinoblastoma. Ophthalmologica 151: 197-213, 1966.179. Scheffer, H.; te Meerman, G. J.; Kruize, Y. C. M.; van den Berg, A. H. M.; Penninga, D. P.; Tan, K. E. W. P.; der Kinderen, D. J.; Buys, C. H. C. M.: Linkage analysis of families with hereditary retinoblastoma: nonpenetrance of mutation, revealed by combined use of markers within and flanking the RB1 gene. Am. J. Hum. Genet. 45: 252-260, 1989.180. Schimke, R. N.; Lowman, J.; Cowan, G.: Retinoblastoma and osteogenic-sarcoma in sibs. Cancer 34: 2077-2079, 1974.181. Schubert, E. L.; Strong, L. C.; Hansen, M. F.: A splicing mutation in RB1 in low penetrance retinoblastoma. Hum. Genet. 100: 557-563, 1997.182. Shields, C. L.; Honavar, S.; Shields, J. A.; Demirci, H.; Meadows, A. T.: Vitrectomy in eyes with unsuspected retinoblastoma. Ophthalmology 107:2250-2255, 2000.183. Shiio, Y.; Yamamoto, T.; Yamaguchi, N.: Negative regulation of Rb expression by the p53 gene product. Proc. Nat. Acad. Sci. 89:5206-5210, 1992.184. Shroeder, W. T.; Chao, L.-Y.; Dao, D. D.; Strong, L. C.; Pathak, S.; Riccardi, V.; Lewis, W. H.; Saunders, G. F.: Nonrandom loss of maternal chromosome 11 alleles in Wilms tumors. Am. J. Hum. Genet. 40:413-420, 1987.185. Sippel, K. C.; Fraioli, R. E.; Smith, G. D.; Schalkoff, M. E.; Sutherland, J.; Gallie, B. L.; Dryja, T. P.: Frequency of somatic and germ-line mosaicism in retinoblastoma: implications for genetic counseling. Am. J. Hum. Genet. 62: 610-619, 1998.186. Smith, S. M.; Sorsby, A.: Retinoblastoma: some genetic aspects. Ann. Hum. Genet. 23: 50-58, 1958.187. Sparkes, R. S.: The genetics of retinoblastoma. Biochim. Biophys. Acta 780: 95-118, 1985.188. Sparkes, R. S.; Muller, H.; Klisak, I.; Abram, J. A.: Retinoblastoma with 13q; chromosomal deletion associated with maternal paracentric inversion of 13q. Science 203: 1027-1029, 1979.189. Sparkes, R. S.; Murphree, A. L.; Lingua, R. W.; Sparkes, M. C.; Field, L. L.; Funderburk, S. J.; Benedict, W. F.: Gene for hereditary retinoblastoma assigned to human chromosome 13 by linkage to esterase D. Science 219: 971-973, 1983.190. Sparkes, R. S.; Sparkes, M. C.; Wilson, M. G.; Towner, J. W.; Benedict, W.; Murphree, A. L.; Yunis, J. J.: Regional assignment of genes for human esterase D and retinoblastoma to chromosome band 13q14. Science 208: 1042-1044, 1980.191. Sparkes, R. S.; Sparkes, M. C.; Wilson, M. G.; Towner, J. W.; Benedict, W.; Murphree, A. L.; Yunis, J. J.: Regional assignment of genes for human esterase D and retinoblastoma to chromosome band 13q14. (Abstract) Cytogenet. Cell Genet. 25: 209, 1979.192. Squire, J.; Gallie, B. L.; Phillips, R. A.: A detailed analysis of chromosomal changes in heritable and non-heritable retinoblastoma. Hum. Genet. 70: 291-301, 1985.193. Squire, J.; Phillips, R. A.; Boyce, S.; Godbout, R.; Rogers, B.; Gallie, B. L.: Isochromosome 6p, a unique chromosomal abnormality in retinoblastoma: verification by standard staining techniques, new densitometric methods, and somatic cell hybridization. Hum. Genet. 66:46-53, 1984.194. Stallard, H. B.: The conservation treatment of retinoblastoma. Trans. Ophthal. Soc. 82: 473, 1962.195. Stone, J. C.; Crosby, J. L.; Kozak, C. A.; Schievella, A. R.; Bernards, R.; Nadeau, J. H.: The murine retinoblastoma homolog maps to chromosome 14 near Es-10. Genomics 5: 70-75, 1989.196. Strong, L. C.; Riccardi, V. M.; Ferrell, R. E.; Sparkes, R. S.: Familial retinoblastoma and chromosome 13 deletion transmitted via an insertional translocation. Science 213: 1501-1503, 1981.197. Taylor, A. I.: Dq-, Dr and retinoblastoma. Humangenetik 10:209-217, 1970.198. Thomas, D. M.; Carty, S. A.; Piscopo, D. M.; Lee, J.-S.; Wang, W.-F.; Forrester, W. C.; Hinds, P. W.: The retinoblastoma protein acts as a transcriptional coactivator required for osteogenic differentiation. Molec. Cell 8: 303-316, 2001.199. Toguchida, J.; Ishizaki, K.; Sasaki, M. S.; Nakamura, Y.; Ikenaga, M.; Kato, M.; Sugimot, M.; Kotoura, Y.; Yamamuro, T.: Preferential mutation of paternally derived RB gene as the initial event in sporadic osteosarcoma. Nature 338: 156-158, 1989.200. Toguchida, J.; McGee, T. L.; Paterson, J. C.; Eagle, J. R.; Tucker, S.; Yandell, D. W.; Dryja, T. P.: Complete genomic sequence of the human retinoblastoma susceptibility gene. Genomics 17: 535-543, 1993.201. Turleau, C.; de Grouchy, J.; Chavin-Colin, F.; Despoisses, S.; Leblanc, A.: Two cases of del(13q)-retinoblastoma and two cases of partial trisomy due to a familial insertion. Ann. Genet. 26: 158-160, 1983.202. Turleau, C.; de Grouchy, J.; Chavin-Colin, F.; Junien, C.; Seger, J.; Schlienger, P.; Leblanc, A.; Haye, C.: Cytogenetic forms of retinoblastoma: their incidence in a survey of 66 patients. Cancer Genet. Cytogenet. 16:321-334, 1985.203. Verma, R. S.; Ramesh, K. H.; Samonte, R. V.; Conte, R. A.: Mapping the homolog of the human Rb1 gene to chromosome 14 of higher primates. Mammalian Genome 7: 591-592, 1996.204. Vogel, F.: Genetics of retinoblastoma. Modern Trends in Ophthalmology. (pub.) 1968.205. Vogel, F.: Genetics of retinoblastoma. In: Genetic Counseling. Heidelberg University, Science Library. Trans. by Sabine Kurth. New York: Springer Verlag (pub.) 1969.206. Vogel, F.: The genetics of retinoblastoma. Hum. Genet. 52:1-54, 1979.207. Warburg, M.: Retinoblastoma. In: Goldberg, M. F.: Genetic and Metabolic Eye Disease. Boston: Little, Brown and Co. (pub.)
[7216] 1974. Pp. 447-461.208. Weichselbaum, R. R.; Beckett, M.; Diamond, A.: Some retinoblastomas, osteosarcomas, and soft tissue sarcomas may share a common etiology. Proc. Nat. Acad. Sci. 85: 2106-2109, 1988.209. Weichselbaum, R. R.; Nove, J.; Little, J. B.: Fibroblasts from a D-deletion type retinoblastoma patient are abnormally x-ray sensitive. Nature 266:726-727, 1977.210. Weinberg, R. A.: The retinoblastoma protein and cell cycle control. Cell 81:323-330, 1995.211. Whyte, P.; Buchkovich, K. J.; Horowitz, J. M.; Friend, S. H.; Raybuck, M.; Weinberg, R. A.; Harlow, E.: Association between an oncogene and an anti-oncogene: the adenovirus E1A proteins bind to the retinoblastoma gene product. Nature 334: 124-129, 1988.212. Wiggs, J.; Nordenskjold, M.; Yandell, D.; Rapaport, J.; Grondin, V.; Janson, M.; Werelius, B.; Petersen, R.; Craft, A.; Riedel, K.; Liberfarb, R.; Walton, D.; Wilson, W.; Dryja, T. P.: Prediction of the risk of hereditary retinoblastoma, using DNA polymorphisms within the retinoblastoma gene. New Eng. J. Med. 318: 151-157, 1988.213. Wilson, M. G.; Ebbin, A. J.; Towner, J. W.; Spencer, W. H.: Chromosomal anomalies in patients with retinoblastoma. Clin. Genet. 12:1-8, 1977.214. Wilson, M. G.; Melnyk, J.; Towner, J. W. J.: Retinoblastoma and deletion D(14) syndrome. J. Med. Genet. 6: 322-327, 1969.215. Wilson, M. G.; Towner, J. W.; Fujimoto, A.: Retinoblastoma and D-chromosome deletions. Am. J. Hum. Genet. 25: 57-61, 1973.216. Windle, J. J.; Albert, D. M.; O'Brien, J. M.; Marcus, D. M.; Disteche, C. M.; Bernards, R.; Mellon, P. L.: Retinoblastoma in transgenic mice. Nature 343: 665-669, 1990.217. Yandell, D. W.; Campbell, T. A.; Dayton, S. H.; Petersen, R.; Walton, D.; Little, J. B.; McConkie-Rosell, A.; Buckley, E.; Dryja, T.: Oncogenic point mutations in the human retinoblastoma gene: their application to genetic counseling. New Eng. J. Med. 321: 1689-1695, 1989.218. Yokota, J.; Akiyama, T.; Fung, Y.-K. T.; Benedict, W. F.; Namba, Y.; Hanaoka, M.; Wada, M.; Terasaki, T.; Shimosato, Y.; Sugimura, T.; Terada, M.: Altered expression of the retinoblastoma (RB) gene in small-cell carcinoma of the lung. Oncogene 3: 471-475, 1988.219. Zeschnigk, M.; Lohmann, D.; Horsthemke, B.: A PCR test for the detection of hypermethylated alleles at the retinoblastoma locus. J. Med. Genet. 36: 793-794, 1999.220. Zhang, H. S.; Postigo, A. A.; Dean, D. C.: Active transcriptional repression by the Rb-E2F complex mediates G1 arrest triggered by p16(INK4a), TGF-beta, and contact inhibition. Cell 97: 53-61, 1999.221. Zhu, X.; Dunn, J. M.; Phillips, R. A.; Goddard, A. D.; Paton, K. E.; Becker, A.; Gallie, B. L.: Preferential germline mutation of the paternal allele in retinoblastoma. Nature 340: 312-313, 1989.
[7217] 1318. Baens, M.; Aerssens, J.; Van Zand, K.; Van den Berghe, H.; Marynen, P.: Isolation and regional assignment of human chromosome 12p cDNAs. Genomics 29:44-52, 1995.
[7218] 1319. Benbrook, D.; Lernhardt, E.; Pfahl, M.: A new retinoic acid receptor identified from a hepatocellular carcinoma. (Letter) Nature 333:669-672, 1988.
[7219] 1320. Brand, N.; Petkovich, M.; Krust, A.; Chambon, P.; de The, H.; Marchio, A.; Tiollais, P.; Dejean, A.: Identification of a second human retinoic acid receptor. (Letter) Nature 332: 850-853, 1988.
[7220] 1321. Dejean, A.; Bougueleret, L.; Grzeschik, K.-H.; Tiollais, P.: Hepatitis B virus DNA integration in a sequence homologous to v-erb-A and steroid receptor genes in a hepatocellular carcinoma. Nature 322: 70-72, 1986.
[7221] 1322. de The, H.; del Mar Vivanco-Ruiz, M.; Tiollais, P.; Stunnenberg, H.; Dejean, A.: Identification of a retinoic acid responsive element in the retinoic acid receptor beta gene. Nature 343: 177-180, 1990.
[7222] 1323. Aruffo, A.; Seed, B.: Molecular cloning of a CD28 cDNA by a high-efficiency COS cell expression system. Proc. Nat. Acad. Sci. 84: 8573-8577, 1987.
[7223] 1324. Lafage-Pochitaloff, M.; Costello, R.; Couez, D.; Simonetti, J.; Mannoni, P.; Mawas, C.; Olive, D.: Human CD28 and CTLA-4 Ig superfamily genes are located on chromosome 2 at bands q33-q34. Immunogenetics 31:198-201, 1990.
[7224] 1325. Lee, K. P.; Taylor, C.; Petryniak, B.; Turka, L. A.; June, C. H.; Thompson, C. B.: The genomic organization of the CD28 gene: implications for the regulation of CD28 mRNA expression and heterogeneity. J. Immun. 145: 344-352, 1990.
[7225] 1326. Lesslauer, W.; Gmunder, H.; Bohlen, P.: Purification and N-terminal amino acid sequence of the human T90/44 (CD28) antigen. Immunogenetics 27:388-391, 1988.
[7226] 1327. Okkenhaug, K.; Wu, L.; Garza, K. M.; La Rose, J.; Khoo, W.; Odermatt, B.; Mak, T. W.; Ohashi, P. S.; Rottapel, R.: A point mutation in CD28 distinguishes proliferative signals from survival signals. Nature Immun. 2: 325-332, 2001.
[7227] 1328. Jourdan-Le Saux, C.; Tomsche, A.; Ujfalusi, A.; Jia, L.; Csiszar, K.: Central nervous system, uterus, heart, and leukocyte expression of the LOXL3 gene, encoding a novel lysyl oxidase-like protein. Genomics 74:211-218, 2001.
[7228] 1329. Maki, J. M.; Kivirikko, K. I.: Cloning and characterization of a fourth human lysyl oxidase isoenzyme. Biochem. J. 355: 381-387, 2001.
[7229] 1330. Riewald, M.; Petrovan, R. J.; Donner, A.; Mueller, B. M.; Ruf, W.: Activation of endothelial cell protease activated receptor 1 by the protein C pathway. Science 296: 1880-1882, 2002.
[7230] 1331. de The, H.; Marchio, A.; Tiollais, P.; Dejean, A.: A novel steroid thyroid hormone receptor-related gene inappropriately expressed inhuman hepatocellular carcinoma. Nature 330: 667-670, 1987.
[7231] 1332. Kreczel, W.; Ghyselinck, N.; Samad, T. A.; Dupe, V.; Kastner, P.; Borrelli, E.; Chambon, P.: Impaired locomotion and dopamine signaling in retinoid receptor mutant mice. Science 279: 863-867, 1998.
[7232] 1333. Lotan, R.; Xu, X.-C.; Lippman, S. M.; Ro, J. Y.; Lee, J. S.; Lee, J. J.; Hong, W. K.: Suppression of retinoic acid receptor-beta in premalignant oral lesions and its upregulation by isotretinoin. New Eng. J. Med. 332: 1405-1410, 1995.
[7233] 1334. Mattei, M.-G.; de The, H.; Mattei, J.-F.; Marchio, A.; Tiollais, P.; Dejean, A.: Assignment of the human hap retinoic acid receptor RAR-beta gene to the p24 band of chromosome 3. Hum. Genet. 80: 189-190, 1988.
[7234] 1335. Nadeau, J. H.; Compton, J. G.; Giguere, V.; Rossant, J.; Varmuza, S.: Close linkage of retinoic acid receptor genes with homeobox- and keratin-encoding genes on paralogous segments of mouse chromosomes 11 and 15. Mammalian Genome 3: 202-208, 1992.
[7235] 1336. Samad, A.; Kreczel, W.; Chambon, P.; Borrelli, E.: Regulation of dopaminergic pathways by retinoids: activation of the D2 receptor promoter by members of the retinoic acid receptor-retinoid X receptor family. Proc. Nat. Acad. Sci. 94: 14349-14354, 1997.
[7236] 1337. Sakaguchi, A. Y.; Zabel, B. U.; Grzeschik, K. H.; Law, M. L.; Ellis, R. W.; Skolnick, E. M.; Naylor, S. L.: Regional localization of two human cellular Kirsten ras genes on chromosomes 6 and 12. Molec. Cell. Biol. 4: 989-993, 1984.
[7237] 1338. Kas, K.; Roijer, E.; Voz, M.; Meyen, E.; Stenman, G.; Van de Ven, W. J. M.: A 2-Mb YAC contig and physical map covering the chromosome 8q12 breakpoint cluster region in pleomorphic adenomas of the salivary glands. Genomics 43: 349-358, 1997.
[7238] 1339. Kas, K.; Voz, M. L.; Roijer, E.; Astrom, A.-K.; Meyen, E.; Stenman, G.; Van de Ven, W. J. M.: Promoter swapping between the genes for a novel zinc finger protein and beta-catenin in pleiomorphic adenomas with t(3;8)(p211;q12) translocations. Nature Genet. 15: 170-174, 1997.
[7239] 1340. Szabo, G.; Dallmann, G.; Muller, G.; Patthy, L.; Soller, M.; Varga, L.: A deletion in the myostatin gene causes the compact (Cmpt) hypermuscular mutation in mice. Mammalian Genome 9: 671-672, 1998.
[7240] 1341. Zimmers, T. A.; Davies, M. V.; Koniaris, L. G.; Haynes, P.; Esquela, A. F.; Tomkinson, K. N.; McPherron, A. C.; Wolfman, N. M.; Lee, S.-J.: Induction of cachexia in mice by systemically administered myostatin. Science 296:1486-1488, 2002.
[7241] 1342. Kimura, K.; Ito, M.; Amano, M.; Chihara, K.; Fukata, Y.; Nakafuku, M.; Yamamori, B.; Feng, J.; Nakano, T.; Okawa, K.; Iwamatsu, A.; Kaibuchi, K.: Regulation of myosin phosphatase by Rho and Rho-associated kinase (Rho-kinase). Science 273: 245-248, 1996.
[7242] 1343. Takahashi, N.; Ito, M.; Tanaka, J.; Nakano, T.; Kaibuchi, K.; Odai, H.; Takemura, K.: Localization of the gene coding for myosin phosphatase, target subunit 1 (MYPT1) to human chromosome 12q15-q21. Genomics 44:150-152, 1997.
[7243] 1344. D'Esposito, M.; Strazzullo, M.; Cuccurese, M.; Spalluto, C.; Rocchi, M.; D'Urso, M.; Ciccodicola, A.: Identification and assignment of the human transient receptor potential channel 6 gene TRPC6 to chromosome 11q21-q22. Cytogenet. Cell Genet. 83: 46-47, 1998.
[7244] 1345. Hofmann, T.; Obukhov, A. G.; Schaefer, M.; Harteneck, C.; Gudermann, T.; Schultz, G.: Direct activation of human TRPC6 and TRPC3 channels by diacylglycerol. Nature 397: 259-263, 1999.
[7245] 1346. Tasheva, E. S.; Pettenati, M.; Von Kap-Her, C.; Conrad, G. W.: Assignment of mimecan gene (OGN) to human chromosome band 9q22 by in situ hybridization. Cytogenet. Cell Genet. 88: 326-327, 2000.
[7246] 1347. Pucharcos, C.; Fuentes, J.-J.; Casas, C.; de la Luna, S.; Alcantara, S.; Arbones, M. L.; Soriano, E.; Estivill, X.; Prichard, M.: Alu-splice cloning of human intersect in (ITSN), a putative multivalent binding protein expressed in proliferating and differentiating neurons and overexpressed in Down syndrome. Europ. J. Hum. Genet. 7: 704-712, 1999.
[7247] 1348. Katz, P.; Whalen, G.; Kehrl, J. H.: Differential expression of a novel protein kinase in human B lymphocytes: preferential localization in the germinal center. J. Biol. Chem. 269: 16802-16809, 1994.
[7248] 1349. Pombo, C. M.; Kehrl, J. H.; Sanchez, I.; Katz, P.; Avruch, J.; Zon, L. I.; Woodgett, J. R.; Force, T.; Kyriakis, J. M.: Activation of the SAPK pathway by the human STE20 homologue germinal centre kinase. Nature 377:750-754, 1995.
[7249] 1350. Ren, M.; Zeng, J.; De Lemos-Chiarandini, C.; Rosenfeld, M.; Adesnik, M.; Sabatini, D. D.: In its active form, the GTP-binding protein rab8 interacts with a stress-activated protein kinase. Proc. Nat. Acad. Sci. 93: 5151-5155, 1996.
[7250] 1351. Sparks, A. B.; Hoffman, N. G.; McConnell, S. J.; Fowlkes, D. M.; Kay, B. K.: Cloning of ligand targets: systematic isolation of SH3 domain-containing proteins. Nature Biotech. 14: 741-744, 1996.
[7251] 1352. Chang, H. Y.; Nishitoh, H.; Yang, X.; Ichijo, H.; Baltimore, D.: Activation of apoptosis signal-regulating kinase 1 (ASK1) by the adapter protein Daxx. Science 281: 1860-1863, 1998.
[7252] 1353. Geleziunas, R.; Xu, W.; Takeda, K.; Ichijo, H.; Greene, W. C.: HIV-1 Nef inhibits ASK1-dependent death signalling providing a potential mechanism for protecting the infected host cell. Nature 410: 834-838, 2001.
[7253] 1354. Ichijo, H.; Nishida, E.; Irie, K.; ten Dijke, P.; Saitoh, M.; Moriguchi, T.; Takagi, M.; Matsumoto, K.; Miyazono, K.; Gotoh, Y.: Induction of apoptosis by ASK1, a mammalian MAPKKK that activates SAPK/JNK and p38 signaling pathways. Science 275: 90-94, 1997.
[7254] 1355. Nishitoh, H.; Saitoh, M.; Mochida, Y.; Takeda, K.; Nakano, H.; Rothe, M.; Miyazono, K.; Ichijo, H.: ASK1 is essential for JNK/SAPK activation by TRAF2. Molec. Cell 2: 389-395, 1998.
[7255] 1356. Tomasetto, C.; Regnier, C.; Moog-Lutz, C.; Mattei, M. G.; Chenard, M. P.; Lidereau, R.; Basset, P.; Rio, M. C.: Identification of four novel human genes amplified and overexpressed in breast carcinoma and localized to the q11-q21.3 region of chromosome 17. Genomics 28:367-376, 1995.
[7256] 1357. Oyake, T.; Itoh, K.; Motohashi, H.; Hayashi, N.; Hoshino, H.; Nishizawa, M.; Yamamoto, M.; Igarashi, K.: Bach proteins belong to a novel family of BTB-basic leucine zipper transcription factors that interact with MafK and regulate transcription through the NF-E2 site. Molec. Cell. Biol. 16: 6083-6095, 1996.
[7257] 1358. Johnson, L.; Mercer, K.; Greenbaum, D.; Bronson, R. T.; Crowley, D.; Tuveson, D. A.; Jacks, T.: Somatic activation of the K-ras oncogene causes early onset lung cancer in mice. Nature 410: 1111-1116, 2001.
[7258] 1359. Kozma, S. C.; Bogaard, M. E.; Buser, K.; Saurer, S. M.; Bos, J. L.; Groner, B.; Hynes, N. E.: The human c-Kirsten ras gene is activated by a novel mutation in codon 13 in the breast carcinoma cell line MDA-MB231. Nucleic Acids Res. 15: 5963-5971, 1987.
[7259] 1360. Laghi, L.; Orbetegli, O.; Bianchi, P.; Zerbi, A.; Di Carlo, V.; Boland, C. R.; Malesci, A.: Common occurrence of multiple K-RAS mutations in pancreatic cancers with associated precursor lesions and in biliary cancers. Oncogene 21: 4301-4306, 2002.
[7260] 1361. Lee, K.-H.; Lee, J.-S.; Suh, C.; Kim, S.-W.; Kim, S.-B.; Lee, J.-H.; Lee, M.-S.; Park, M.-Y.; Sun, H.-S.; Kim, S.-H.: Clinicopathologic significance of the K-ras gene codon 12 point mutation in stomach cancer: an analysis of 140 cases. Cancer 75: 2794-2801, 1995.
[7261] 1362. Liu, E.; Hjelle, B.; Morgan, R.; Hecht, F.; Bishop, J. M.: Mutations of the Kirsten-ras proto-oncogene in human preleukaemia. Nature 330:186-188, 1987.
[7262] 1363. McBride, O. W.; Swand, D. C.; Tronick, S. R.; Gol, R.; Klimanis, D.; Moore, D. E.; Aaronson, S. A.: Regional chromosomal localization of N-ras, K-ras-1, K-ras-2 and myb oncogenes in human cells. Nucleic Acids Res. 11: 8221-8236, 1983.
[7263] 1364. McCoy, M. S.; Toole, J. J.; Cunningham, J. M.; Chang, E. H.; Lowy, D. R.; Weinberg, R. A.: Characterization of a human colon/lung carcinoma oncogene. Nature 302: 79-81, 1983.
[7264] 1365. McGrath, J. P.; Capon, D. J.; Smith, D. H.; Chen, E. Y.; Seeburg, P. H.; Goeddel, D. V.; Levinson, A. D.: Structure and organization of the human Ki-ras proto-oncogene and a related processed pseudo gene. Nature 304:501-506, 1983.
[7265] 1366. Motojima, K.; Urano, T.; Nagata, Y.; Shiku, H.; Tsurifune, T.; Kanematsu, T.: Detection of point mutations in the Kirsten-ras oncogene provides evidence for the multi-centricity of pancreatic carcinoma. Ann. Surg. 217: 138-143, 1993.
[7266] 1367. Muller, R.; Slamon, D. J.; Adamson, E. D.; Tremblay, J. M.; Muller, D.; Cline, M. J.; Verma, I. M.: Transcription of c-onc genes c-ras (Ki) and c-fms during mouse development. Molec. Cell. Biol. 3: 1062-1069, 1983.
[7267] 1368. Nakano, H.; Yamamoto, F.; Neville, C.; Evans, D.; Mizuno, T.; Perucho, M.: Isolation of transforming sequences of two human lung carcinomas: structural and functional analysis of the activated c-K-ras oncogenes. Proc. Nat. Acad. Sci. 81: 71-75, 1984.
[7268] 1369. O'Brien, S. J.; Nash, W. G.; Goodwin, J. L.; Lowry, D. R.; Chang, E. H.: Dispersion of the ras family of transforming genes to four different chromosomes in man. Nature 302: 839-842, 1983.
[7269] 1370. O'Connell, P.; Leppert, M.; Hoff, M.; Kumlin, E.; Thomas, W.; Cai, G.; Law, M.; White, R.: A linkage map for human chromosome 12. (Abstract) Am. J. Hum. Genet. 37: A169 only, 1985.
[7270] 1371. Ohashi, H.; Ishikiriyama, S.; Fukushima, Y.: New diagnostic method for Pallister-Killian syndrome: detection of i(12p) in interphase nuclei of buccal mucosa by fluorescence in situ hybridization. Am. J. Med. Genet. 45: 123-128, 1993.
[7271] 1372. Otori, K.; Oda, Y.; Sugiyama, K.; Hasebe, T.; Mukai, K.; Fujii, T.; Tajiri, H.; Yoshida, S.; Fukushima, S.; Esumi, H.: High frequency of K-ras mutations in human colorectal hyperplastic polyps. Gut 40:660-663, 1997.
[7272] 1373. Peltomaki, P.; Knuutila, S.; Ritvanen, A.; Kaitila, I.; de laChapelle, A.: Pallister-Killian syndrome: cytogenetic and molecular studies. Clin. Genet. 31: 399-405, 1987.
[7273] 1374. Pfeifer, G. P.: A new verdict for an old convict. Nature Genet. 29:3-4, 2001.
[7274] 1375. Porta, M.; Malats, N.; Jariod, M.; Grimalt, J. O.; Rifa, J.; Carrato, A.; Guarner, L.; Salas, A.; Santiago-Silva, M.; Corominas, J. M.; Andreu, M.; Real, F. X.: Serum concentrations of organochlorine compounds and K-ras mutations in exocrine pancreatic cancer. Lancet 354: 2125-2129, 1999.
[7275] 1376. Pulciani, S.; Santos, E.; Lauver, A. V.; Long, L. K.; Aaronson, S. A.; Barbacid, M.: Oncogene in solid human tumors. Nature 300:539-542, 1982.
[7276] 1377. Rodenhuis, S.; van de Wetering, M. L.; Mooi, W. J.; Evers, S. G.; van Zandwijk, N.; Bos, J. L.: Mutational activation of the K-RAS oncogene: a possible pathogenetic factor in adenocarcinoma of the lung. New Eng. J. Med. 317: 929-935, 1987.
[7277] 1378. Santos, E.; Martin-Zanca, D.; Reddy, E. P.; Pierotti, M. A.; DellaPorta, G.; Barbacid, M.: Malignant activation of a K-ras oncogene in lung carcinoma but not in normal tissue of the same patient. Science 223:661-664, 1984.
[7278] 1379. Schinzel, A.: Tetrasomy 12p (Pallister-Killian syndrome). J. Med. Genet. 28: 122-125, 1991.
[7279] 1380. Shimizu, K.; Birnbaum, D.; Ruley, M. A.; Fasano, O.; Suard, Y.; Edlund, L.; Taparowsky, E.; Goldfarb, M.; Wigler, M.: Structure of the Ki-ras gene of the human lung carcinoma cell line Calu-1. Nature 304:497-500, 1983.
[7280] 1381. Sidransky, D.; Tokino, T.; Hamilton, S. R.; Kinzler, K. W.; Levin, B.; Frost, P.; Vogelstein, B.: Identification of RAS oncogene mutations in the stool of patients with curable colorectal tumors. Science 256:102-105, 1992.
[7281] 1382. Smit, V. T. H. B. M.; Boot, A. J. M.; Smits, A. M. M.; Fleuren, G. J.; Cornelisse, C. J.; Bos, J. L.: KRAS codon 12 mutations occurvery frequently in pancreatic adenocarcinomas. Nucleic Acids Res. 16:7773-7782, 1988.
[7282] 1383. Soukup, S.; Neidich, K.: Prenatal diagnosis of Pallister-Killiansyndrome. Am. J. Med. Genet. 35: 526-528, 1990.
[7283] 1384. Speleman, F.; Leroy, J. G.; Van Roy, N.; De Paepe, A.; Suijkerbuijk, R.; Brunner, H.; Looijenga, L.; Verschraegen-Spae, M.-R.; Orye, E.: Pallister-Killian syndrome: characterization of the isochromosome 12p by fluorescent in situ hybridization. Am. J. Med. Genet. 41:381-387, 1991.
[7284] 1385. Takeda, S.; Ichii, S.; Nakamura, Y.: Detection of Kras mutation in sputum by mutant-allele-specific amplification (MASA). Hum. Mutat. 2:112-117, 1993.
[7285] 1386. Weinberg, R. A.: Fewer and fewer oncogenes. Cell 30: 3-4, 1982.
[7286] 1387. Wenger, S. L.; Boone, L. Y.; Steele, M. W.: Mosaicism in Pallisteri (12p) syndrome. Am. J. Med. Genet. 35: 523-525, 1990.
[7287] 1388. Wingo, P. A.; Ries, L. A. G.; Giovino, G. A.; Miller, D. S.; Rosenberg, H. M.; Shopland, D. R.; Thun, M. J.; Edwards, B. K.: Annual report to the nation on the status of cancer, 1973-1996, with a special section on lung cancer and tobacco smoking. J. Nat. Cancer Inst. 91: 675-690, 1999.
[7288] 1389. Yanez, L.; Groffen, J.; Valenzuela, D. M.: c-K-ras mutations in human carcinomas occur preferentially in codon 12. Oncogene 1:315-318, 1987.
[7289] 1390. Zakowski, M. F.; Wright, Y.; Ricci, A., Jr.: Pericardial agenesis and focal aplasia cutis in tetrasomy 12p (Pallister-Killian syndrome). Am. J. Med. Genet. 42: 323-325, 1992.
[7290] 1391. Zhang, J.; Marynen, P.; Devriendt, K.; Fryns, J.-P.; Van den Berghe, H.; Cassiman, J.-J.: Molecular analysis of the isochromosome 12p in the Pallister-Killian syndrome: construction of a mouse-human hybrid cell line containing an i(12p) as the sole human chromosome. Hum. Genet. 83: 359-363, 1989.
[7291] 1392. Zhang, Z.; Wang, Y.; Vikis, H. G.; Johnson, L.; Liu, G.; Li, J.; Anderson, M. W.; Sills, R. C.; Hong, H. L.; Devereux, T. R.; Jacks, T.; Guan, K.-L.; You, M.: Wildtype Kras2 can inhibit lung carcinogenesis in mice. Nature Genet. 29: 25-33, 2001.
[7292] 1393. Lu, T. T.; Makishima, M.; Repa, J. J.; Schoonjans, K.; Kerr, T. A.; Auwerx, J.; Mangelsdorf, D. J.: Molecular basis for feedback regulation of bile acid synthesis by nuclear receptors. Molec. Cell 6:507-515, 2000.
[7293] 1394. Repa, J. J.; Turley, S. D.; Lobaccaro, J.-M. A.; Medina, J.; Li, L.; Lustig, K.; Shan, B.; Heyman, R. A.; Dletschy, J. M.; Mangelsdorf, D. J.: Regulation of absorption and ABC1-mediated efflux of cholesterol by RXR heterodimers. Science 289: 1524-1529, 2000.
[7294] 1395. Hymowitz, S. G.; Christinger, H. W.; Fuh, G.; Ultsch, M.; O'Connell, M.; Kelley, R. F.; Ashkenazi, A.; de Vos, A. M.: Triggering cell death: the crystal structure of Apo2L/TRAIL in a complex with death receptor 5. Molec. Cell 4: 563-571, 1999.
[7295] 1396. Anguita, J.; Chalfant, M. L.; Civan, M. M.; Coca-Prados, M.: Molecular cloning of the human volume-sensitive chloride conductance regulatory protein, pI(Cln), from ocular ciliary epithelium. Biochem. Biophys. Res. Commun. 208: 89-95, 1995.
[7296] 1397. Buyse, G.; De Greef, C.; Raeymaekers, L.; Droogmans, G.; Nilius, B.; Eggermont, J.: The ubiquitously expressed pI(Cln) protein forms homomeric complexes in vitro. Biochem. Biophys. Res. Commun. 218:822-827, 1996.
[7297] 1398. Nagl, U. O.; Erdel, M.; Schmarda, A.; Seri, M.; Pinggera, G. M.; Gschwentner, M.; Duba, C.; Galietta, L. J. V.; Deetjen, P.; Utermann, G.; Paulmichl, M.: Chromosomal localization of the genes (CLNS1A and CLNS1B) coding for the swelling-dependent chloride channel I(Cln). Genomics 38:438-441, 1996.
[7298] 1399. Schwartz, R. S.; Rybicki, A. C.; Nagel, R. L.: Molecular cloning and expression of a chloride channel-associated protein pI(Cln) inhuman young red blood cells: association with actin. Biochem. J. 327:609-616, 1997.
[7299] 1400. Biunno, I.; Appierto, V.; Cattaneo, M.; Leone, B. E.; Balzano, G.; Socci, C.; Saccone, S.; Letizia, A.; Valle, G. D.; Sgaramella, V.: Isolation of a pancreas-specific gene located on human chromosome 14q31: expression analysis in human pancreatic ductal carcinomas. Genomics 46:284-286, 1997.
[7300] 1401. Donoviel, D. B.; Bernstein, A.: SEL-1L maps to human chromosome 14, near the insulin-dependent diabetes mellitus locus 11. Genomics 56:232-233, 1999.
[7301] 1402. Grant, B.; Greenwald, I.: The Caenorhabditis. elegans sel-1 gene, a negative regulator of lin-12 and glp-1, encodes a predicted extracellular protein. Genetics 143: 237-247, 1996.
[7302] 1403. Grant, B.; Greenwald, I.: Structure, function and expression of SEL-1, a negative regulator of LIN-12 and GLP-1 in C. elegans. Development 124:637-644, 1997.
[7303] 1404. O'Carroll, D.; Scherthan, H.; Peters, A. H. F. M.; Opravil, S.; Haynes, A. R.; Laible, G.; Rea, S.; Schmid, M.; Lebersorger, A.; Jerratsch, M.; Sattler, L.; Mattei, M. G.; Denny, P.; Brown, S. D. M.; Schweizer, D.; Jenuwein, T.: Isolation and characterization of Suv39h2, a second histone H3 methyltransferase gene that displays testis-specific expression. Molec. Cell. Biol. 20: 9423-9433, 2000.
[7304] 1405. Drewes, G.; Ebneth, A.; Preuss, U.; Mandelkow, E. M.; Mandelkow, E.: MARK, a novel family of protein kinases that phosphorylate microtubule-associated proteins and trigger microtubule disruption. Cell 89: 297-308, 1997.
[7305] 1406. Nagase, T.; Kikuno, R.; Ishikawa, K.; Hirosawa, M.; Ohara, O.: Prediction of the coding sequences of unidentified human genes. XVII. The complete sequences of 100 new cDNA clones from brain which code for large proteins in vitro. DNA Res. 7: 143-150, 2000.
[7306] 1407. Yoshikawa, T.; Sanders, A. R.; Esterling, L. E.; Detera-Wadleigh, S. D.: Multiple transcriptional variants and RNA editing in C18orf1, a novel gene with LDLRA and transmembrane domains on 18p11.2. Genomics 47:246-257, 1998.
[7307] 1408. Yoshikawa, T.; Sanders, A. R.; Esterling, L. E.; Overharser, J.; Garnes, J. A.; Lennon, G.; Grewal, R.; Detera-Wadleigh, S. D.: Isolation of chromosome 18-specific brain transcripts as positional candidates for bipolar disorder. Am. J. Med. Genet. (Neuropsych. Genet.) 74:140-149, 1997.
[7308] 1409. Anneren, C.; Reedquist, K. A.; Bos, J. L.; Welsh, M.: GTK, a Src-related tyrosine kinase, induces nerve growth factor-independent neurite outgrowth in PC12 cells through activation of the Rap1 pathway: relationship to Shb tyrosine phosphorylation and elevated levels of focal adhesion kinase. J. Biol. Chem. 275: 29153-29161, 2000.
[7309] 1410. Cance, W. G.; Craven, R. J.; Bergman, M.; Xu, L.; Alitalo, K.; Liu, E. T.: Rak, a novel nuclear tyrosine kinase expressed in epithelial cells. Cell Growth Differ. 5: 1347-1355, 1994.
[7310] 1411. Cance, W. G.; Craven, R. J.; Weiner, T. M.; Liu, E. T.: Novel protein kinases expressed in human breast cancer. Int. J. Cancer 54:571-577, 1993.
[7311] 1412. Lee, J.; Wang, Z.; Luoh, S.-M.; Wood, W. I.; Scadden, D. T.: Cloning of FRK, a novel human intracellular SRC-like tyrosine kinase-encoding gene. Gene 138: 247-251, 1994.
[7312] 1413. Scott, A. F.: Personal Communication. Baltimore, Md. Dec. 19, 2001.
[7313] 1414. Gao, J.; Yu, L.; Zhang, P.; Jiang, J.; Chen, J.; Peng, J.; Wei, Y.; Zhao, S.: Cloning and characterization of human and mouse mitochondrial elongation factor G, GFM and Gfm, and mapping of GFM to human chromosome 3q25.1-q26.2. Genomics 74: 109-114, 2001.
[7314] 1415. Miura, K.; Jacques, K. M.; Stauffer, S.; Kubosaki, A.; Zhu, K.; Hirsch, D. S.; Resau, J.; Zheng, Y.; Randazzo, P. A.: ARAP1: a point of convergence for Arf and Rho signaling. Molec. Cell 9: 109-119, 2002.
[7315] 1416. Koontz, J. I.; Soreng, A. L.; Nucci, M.; Kuo, F. C.; Pauwels, P.; van den Berghe, H.; Cin, P. D.; Fletcher, J. A.; Sklar, J.: Frequent fusion of the JAZF1 and JJAZ1 genes in endometrial stromal tumors. Proc. Nat. Acad. Sci. 98: 6348-6353, 2001.
[7316] 1417. Fitzgerald, K. A.; Palsson-McDermott, E. M.; Bowie, A. G.; Jefferies, C. A.; Mansell, A. S.; Brady, G.; Brint, E.; Dunne, A.; Gray, P.; Harte, M. T.; McMurray, D.; Smith, D. E.; Sims, J. E.; Bird, T. A.; O'Neill, L. A. J.: Mal (MyD88-adapter-like) is required for Toll-like receptor-4 signal transduction. Nature 413: 78-83, 2001.
[7317] 1418. Horng, T.; Barton, G. M.; Medzhitov, R.: TIRAP: an adapter molecule in the Toll signaling pathway. Nature Immun. 2: 835-841, 2001.
[7318] 1419. Mirzayans, F.; Pearce, W. G.; MacDonald, I. M.; Walter, M. A.: Mutation of the PAX6 gene in patients with autosomal dominant keratitis. Am. J. Hum. Genet. 57: 539-548, 1995.
[7319] 1420. Liang, J. C.; Chang, K. S.; Schroeder, W.; Siciliano, M.; Trujillo, J.; Stass, S.: The human myeloperoxidase gene locates on chromosome 17q22-24 and is translocated in acute promyelocytic leukemia. (Abstract) Am. J. Hum. Genet. 41: A226, 1987.
[7320] 1421. Liang, J. C.; Chang, K. S.; Schroeder, W. T.; Freireich, E. J.; Stass, S. A.; Trujillo, J. M.: The myeloperoxidase gene is translocated from chromosome 17 to 15 in a patient with acute promyelocytic leukemia. Cancer Genet. Cytogenet. 30: 103-107, 1988.
[7321] 1422. Miki, T.; Weil, S. C.; Rosner, G. L.; Reid, M. S.; Kidd, K. K.: An MPO cDNA clone identifies an RFLP with Pstl. Nucleic Acids Res. 16:1649, 1988.
[7322] 1423. Morishita, K.; Kubota, N.; Asano, S.; Kaziro, Y.; Nagata, S.: Molecular cloning and characterization of cDNA for human myeloperoxidase. J. Biol. Chem. 262: 3844-3851, 1987.
[7323] 1424. Murao, S.-I.; Stevens, F. J.; Ito, A.; Huberman, E.: Myeloperoxidase: a myeloid cell nuclear antigen with DNA-binding properties. Proc. Nat. Acad. Sci. 85: 1232-1236, 1988.
[7324] 1425. Nauseef, W.; Cogley, M.; McCormick, S.: Effect of the R569W missense mutation on the biosynthesis of myeloperoxidase. J. Biol. Chem. 271:9546-9549, 1996.
[7325] 1426. Nauseef, W. M.; Olsson, I.; Arnljots, K.: Biosynthesis and processing of myeloperoxidase—a marker for myeloid cell differentiation. Europ. J. Haemat. 40: 97-110, 1988.
[7326] 1427. Reynolds, W. F.; Hiltunen, M.; Pirskanen, M.; Mannermaa, A.; Helisalmi, S.; Lehtovirta, M.; Alafuzoff, I.; Soininen, H.: MPO and APOE epsilon-4 polymorphisms interact to increase risk for AD in Finnish males. Neurology 55:1284-1290, 2000.
[7327] 1428. Robinson, T. J.; Morris, D. J.; Ledbetter, D. H.: Chromosomal assignment and regional localization of myeloperoxidase in the mouse. Cytogenet. Cell Genet. 53: 83-86, 1990.
[7328] 1429. Romano, M.; Dri, P.; Dadalt, L.; Patriarca, P.; Baralle, F. E.: Biochemical and molecular characterization of hereditary myeloproliferative deficiency. Blood 90: 4126-4134, 1997.
[7329] 1430. van Tuinen, P.; Johnson, K. R.; Ledbetter, S. A.; Nussbaum, R. L.; Rovera, G.; Ledbetter, D. H.: Localization of myeloperoxidase to the long arm of human chromosome 17: relationship to the 15;17 translocation of acute promyelocytic leukemia. Oncogene 1: 319-322, 1987.
[7330] 1431. Weil, S. C.; Rosner, G. L.; Reid, M. S.; Chisholm, R. L.; Farber, N. M.; Spitznagel, J. K.; Swanson, M. S.: cDNA cloning of human myeloperoxidase: decrease in myeloperoxidase mRNA upon induction of HL-60 cells. Proc. Nat. Acad. Sci. 84: 2057-2061, 1987.
[7331] 1432. Weil, S. C.; Rosner, G. L.; Reid, M. S.; Chisholm, R. L.; Lemons, R. S.; Swanson, M. S.; Carrino, J. J.; Diaz, M. O.; Le Beau, M. M.: Translocation and rearrangement of myeloperoxidase gene in acute promyelocytic leukemia. Science 240: 790-792, 1988.
[7332] 1433. Yamada, M.; Hur, S.-J.; Hashinaka, K.; Tsuneoka, K.; Saeki, T.; Nishio, C.; Sakiyama, F.; Tsunasawa, S.: Isolation and characterization of a cDNA coding for human myeloperoxidase. Arch. Biochem. Biophys. 255:147-155, 1987.
[7333] 1434. Zaki, S. R.; Austin, G. E.; Chan, W. C.; Conaty, A. L.; Trusler, S.; Trappier, S.; Lindsey, R. B.; Swan, D. C.: Chromosomal localization of the human myeloperoxidase gene by in situ hybridization using oligonucleotide probes. Genes Chromosomes Cancer 2: 266-270, 1990.
[7334] 1435. Nishida, K.; Yoshida, Y.; Itoh, M.; Fukada, T.; Ohtani, T.; Shirogane, T.; Atsumi, T.; Takahashi-Tezuka, M.; Ishihara, K.; Hibi, M.; Hirano, T.: Gab-family adapter proteins act downstream of cytokine and growth factor receptors and T- and B-cell antigen receptors. Blood 93:1809-1816, 1999.
[7335] 1436. Zhao, C.; Yu, D.-H.; Shen, R.; Feng, G.-S.: Gab2, a new pleckstrin homology domain-containing adapter protein, acts to uncouple signaling from ERK kinase to Elk-1. J. Biol. Chem. 274: 19649-19654, 1999.
[7336] 1437. Nosaka, K.; Onozuka, M.; Kakazu, N.; Hibi, S.; Nishimura, H.; Nishino, H.; Abe, T.: Isolation and characterization of a human thiamine pyrophosphokinase cDNA. Biochem. Biophys. Acta 1517: 293-297, 2001.
[7337] 1438. Nosaka, K.; Onozuka, M.; Nishino, H.; Nishimura, H.; Kawasaki, Y.; Ueyama, H.: Molecular cloning and expression of a mouse thiaminpyrophosphokinase cDNA. J. Biol. Chem. 274: 34129-34133, 1999.
[7338] 1439. Zhao, R.; Gao, F.; Goldman, I. D.: Molecular cloning of human thiamin pyrophosphokinase. Biochim. Biophys. Acta 1517: 320-322, 2001.
[7339] 1440. Reboul, J.; Gardiner, K.; Monneron, D.; Uze, G.; Lutfalla, G.: Comparative genomic analysis of the interferon/interleukin-10 receptor gene cluster. Genome Res. 9: 242-250, 1999.
[7340] 1441. Koyama, K.; Sudo, K.; Nakamura, Y.: Isolation of 115 human chromosome 8-specific expressed-sequence tags by exon amplification. Genomics 26:245-253, 1995.
[7341] 1442. Pata, I.; Tensing, K.; Metspalu, A.: A human cDNA encoding the homologue of NADH: ubiquinone oxidoreductase subunit B13. Biochim. Biophys. Acta 1350: 115-118, 1997.
[7342] 1443. Russell, M. W.; du Manoir, S.; Collins, F. S.; Brody, L. C.: Cloning of the human NADH: ubiquinone oxidoreductase subunit B13: localization to chromosome 7q32 and identification of a pseudo gene on 11p15. Mammalian Genome 8: 60-61, 1997.
[7343] 1444. Lee, J. W.; Choi, H.-S.; Gyuris, J.; Brent, R.; Moore, D. D.: Two classes of proteins dependent on either the presence or absence of thyroid hormone for interaction with the thyroid hormone receptor. Molec. Endocr. 9: 243-254, 1995.
[7344] 1445. Venturini, L.; You, J.; Stadler, M.; Galien, R.; Lallemand, V.; Koken, M. H. M.; Mattei, M. G.; Ganser, A.; Chambon, P.; Losson, R.; de The, H.: TIF1-gamma, a novel member of the transcriptional intermediary factor 1 family. Oncogene 18: 1209-1217, 1999.
[7345] 1446. Pizutti, A.; Novelli, G.; Ratti, A.; Amati, F.; Mari, A.; Calabrese, G.; Nicolis, S.; Silani, V.; Marino, B.; Scarlato, G.; Ottolenghi, S.; Dallapiccola, B.: UFD1L, a developmentally expressed ubiquitination gene, is deleted in CATCH 22 syndrome. Hum. Molec. Genet. 6: 259-265, 1997.
[7346] 1447. Yamagishi, H.; Garg, V.; Matsuoka, R.; Thomas, T.; Srivastava, D.: A molecular pathway revealing a genetic basis for human cardiac and craniofacial defects. Science 283: 1158-1161, 1999.
[7347] 1448. Teumer, J.; Tseng, H.; Green, H.: The human basonuclin gene. Gene 188:1-7, 1997.
[7348] 1449. Tseng, H.; Green, H.: Basonuclin: a keratinocyte protein with multiple paired zinc fingers. Proc. Nat. Acad. Sci. 89: 10311-10315, 1992.
[7349] 1450. Tseng, H.; Green, H.: Association of basonuclin with ability of keratinocytes to multiply and with absence of terminal differentiation. J. Cell Biol. 126: 495-506, 1994.
[7350] 1451. Okamura, H.; Miyake, S.; Sumi, Y.; Yamaguchi, S.; Yasui, A.; Muijtjens, M.; Hoeijmakers, J. H. J.; van der Horst, G. T. J.: Photic induction of mPer1 and mPer2 in Cry-deficient mice lacking a biological clock. Science 286:2531-2534, 1999.
[7351] 1452. Reick, M.; Garcia, J. A.; Dudley, C.; McKnight, S. L.: NPAS2: an analog of clock operative in the mammalian forebrain. Science 293:506-509, 2001.
[7352] 1453. Fardaei, M.; Rogers, M. T.; Thorpe, H. M.; Larkin, K.; Hamshere, M. G.; Harper, P. S.; Brook, J. D.: Three proteins, MBNL, MBLL and MBXL, co-localize in vivo with nuclear foci of expanded-repeat transcripts in DM1 and DM2 cells. Hum. Molec. Genet. 11: 805-814, 2002.
[7353] 1454. Miller, J. W.; Urbinati, C. R.; Teng-umnuay, P.; Stenberg, M. G.; Byrne, B. J.; Thornton, C. A.; Swanson, M. S.: Recruitment of human muscle blind proteins to (CUG)n expansions associated with myotonic dystrophy. EMBO J. 19: 4439-4448, 2000.
[7354] 1455. Imataka, H.; Olsen, H. S.; Sonenberg. N.: A new translational regulator with homology to eukaryotic translation initiation factor 4G. EMBO J. 16: 817-825, 1997.
[7355] 1456. Levy-Strumpf, N.; Deiss, L. P.; Berissi, H.; Kimchi, A.: DAP-5, a novel homolog of eukaryotic translation initiation factor 4G isolated as a putative modulator of gamma interferon-induced programmed cell death. Molec. Cell. Biol. 17: 1615-1625, 1997.
[7356] 1457. Shaughnessy, J. D., Jr.; Jenkins, N. A.; Copeland, N. G.: cDNA cloning, expression analysis, and chromosomal localization of a gene with high homology to wheat elF(iso)-4F and mammalian elF-4G. Genomics 39:192-197, 1997.
[7357] 1458. Yamanaka, S.; Poksay, K. S.; Arnold, K. S.; Innerarity, T. L.: A novel translational repressor mRNA is edited extensively in livers containing tumors caused by the transgene expression of the apoB mRNA-editing enzyme. Genes Dev. 11: 321-333, 1997.
[7358] 1459. Westendorf, J. M.; Rao, P. N.; Gerace, L.: Cloning of cDNAs for M-phase phosphoproteins recognized by the MPM2 monoclonal antibody and determination of the phosphorylated epitope. Proc. Nat. Acad. Sci. 91: 714-718, 1994.
[7359] 1460. Wang, X. S.; Diener, K.; Jannuzzi, D.; Trollinger, D.; Tan, T.-H.; Lichenstein, H.; Zukowski, M.; Yao, Z.: Molecular cloning and characterization of a novel protein kinase with a catalytic domain homologous to mitogen-activated protein kinase kinase kinase. J. Biol. Chem. 271: 31607-31611, 1996.
[7360] 1461. Bromme, D.; Rossi, A. B.; Smeekens, S. P.; Anderson, D. C.; Payan, D. G.: Human bleomycin hydrolase: molecular cloning, sequencing, functional expression, and enzymatic characterization. Biochemistry 35:6706-6714, 1996.
[7361] 1462. Cloos, J.; Nieuwenhuis, E. J. C.; Boomsma, D. I.; Kuik, D. J.; van der Sterre, M. L. T.; Arwert, F.; Snow, G. B.; Braakhuis, B. J. M.: Inherited susceptibility to bleomycin-induced chromatid breaks in cultured peripheral blood lymphocytes. J. Nat. Cancer Inst. 91:1125-1130, 1999.
[7362] 1463. Farrer, L. A.; Abraham, C. R.; Haines, J. L.; Rogaeva, E. A.; Song, Y.; McGraw, W. T.; Brindle, N.; Premkumar, S.; Scott, W. K.; Yamaoka, L. H.; Saunders, A. M.; Roses, A. D.; Auerbach, S. A.; Sorbi, S.; Duara, R.; Pericak-Vance, M. A.; St. George-Hyslop, P. H.: Association between bleomycin hydrolase and Alzheimer's disease in Caucasians. Ann. Neurol. 44: 808-811, 1998.
[7363] 1464. Ferrando, A. A.; Pendas, A. M.; Llano, E.; Velasco, G.; Lidereau, R.; Lopez-Otin, C.: Gene characterization, promoter analysis, and chromosomal localization of human bleomycin hydrolase. J. Biol. Chem. 272:33298-33304, 1997.
[7364] 1465. Ferrando, A. A.; Velasco, G.; Campo, E.; Lopez-Otin, C.: Cloning and expression analysis of human bleomycin hydrolase, a cysteine proteinase involved in chemotherapy resistance. Cancer Res. 56: 1746-1750, 1996.
[7365] 1466. Haston, C. K.; Amos, C. I.; King, T. M.; Travis, E. L.: Inheritance of susceptibility to bleomycin-induced pulmonary fibrosis in the mouse. Cancer Res. 56: 2596-2601, 1996.
[7366] 1467. Hsu, T. C.; Johnston, D. A.; Cherry, L. M.; Ramkissoon, D.; Schantz, S. P.; Jessup, J. M.; Winn, R. J.; Shirley, L.; Furlong, C.: Sensitivity to genotoxic effects of bleomycin in humans: possible relationship to environmental carcinogenesis. Int. J. Cancer 43: 403-409, 1989.
[7367] 1468. Lazo, J. S.; Humphreys, C. J.: Lack of metabolism as the biochemical basis of bleomycin-induced pulmonary toxicity. Proc. Nat. Acad. Sci. 80:3064-3068, 1983.
[7368] 1469. Montoya, S. E.; Aston, C. E.; DeKosky, S. T.; Kamboh, M. I.; Lazo, J. S.; Ferrell, R. E.: Bleomycin hydrolase is associated with risk of sporadic Alzheimer's disease. (Letter) Nature Genet. 18: 211-212, 1998. Note: Erratum: Nature Genet. 19: 404 only, 1998.
[7369] 1470. Montoya, S. E.; Ferrell, R. E.; Lazo, J. S.: Genomic structure and genetic mapping of the human neutral cysteine protease bleomycin hydrolase. Cancer Res. 57: 4191-4195, 1997.
[7370] 1471. Zheng, W.; Johnston, S. A.; Joshua-Tor, L.: The unusual active site of Gal6/bleomycin hydrolase can act as a carboxypeptidase, aminopeptidase, and peptide ligase. Cell 93: 103-109, 1998.
[7371] 1472. Xu, X.-N.; Screaton, G. R.; Gotch, F. M.; Dong, T.; Tan, R.; Almond, N.; Walker, B.; Stebbings, R.; Kent, K.; Nagata, S.; Stott, J. E.; McMichael, A. J.: Evasion of cytotoxic T lymphocyte (CTL) responses by Nef-dependent induction of Fas ligand (CD95L) expression on simian immunodeficiency virus-infected cells. J. Exp. Med. 186: 7-16, 1997.
[7372] 1473. Wang, B.; Kishihara, K.; Zhang, D.; Hara, H.; Nomoto, K.: Molecular cloning and characterization of a novel human receptor protein tyrosine phosphatase gene, hPTP-J: down-regulation of gene expression by PMA and calcium ionophore in Jurkat T lymphoma cells. Biochem. Biophys. Res. Commun. 231: 77-81, 1997.
[7373] 1474. Wang, H; Lian, Z; Lerch, M. M.; Chen, Z; Xie, W; Ullrich, A.: Characterization of PCP-2, a novel receptor protein tyrosine phosphatase of the MAM domain family. Oncogene 12: 2555-2562, 1996.
[7374] 1475. Khoja, H.; Wang, G.; Ng, C.-T. L.; Tucker, J.; Brown, T.; Shyamala, V.: Cloning of CCRL1, an orphan seven transmembrane receptor related to chemokine receptors, expressed abundantly in the heart. Gene 246:229-238, 2000.
[7375] 1476. Schweickart, V. L.; Epp, A.; Raport, C. J.; Gray, P. W.: CCR11 is a functional receptor for the monocyte chemoattractant protein family of chemokines. J. Biol. Chem. 275: 9550-9556, 2000. Note: Erratum: J. Biol. Chem. 276: 856 only, 2001.
[7376] 1477. Ungar, D.; Oka, T.; Brittle, E. E.; Vasile, E.; Lupashin, V. V.; Chatterton, J. E.; Heuser, J. E.; Krieger, M.; Waters, M. G.: Characterization of a mammalian Golgi-localized protein complex, COG, that is required for normal Golgi morphology and function. J. Cell Biol. 157: 405-415, 2002.
[7377] 1478. Dabovic, B.; Chen, Y.; Colarossi, C.; Obata, H.; Zambuto, L.; Perle, M. A.; Rifkin, D. B.: Bone abnormalities in latent TGF-beta binding protein (Ltbp)-3-null mice indicate a role for Ltbp-3 in modulating TGF-beta bioavailability. J. Cell Biol. 156: 227-232, 2002.
[7378] 1479. Li, X.; Yin, W.; Perez-Jurado, L.; Bonadio, J.; Francke, U.: Mapping of human and murine genes for latent TGF-beta binding protein-2 (LTBP2). Mammalian Genome 6: 42-45, 1995.
[7379] 1480. Sawicki, M.; Arnold, E.; Ebrahimi, S.; Duell, T.; Jin, S.; Wood, T.; Chakrabarti, R.; Peters, J.; Wan, Y.; Samara, G.; Weier, H.-U. G.; Udar, N.; Passaro, E., Jr.; Srivatsan, E. S.: A transcript map encompassing the multiple endocrine neoplasia type-1 (MEN1) locuson chromosome 11q13. Genomics 42: 405-412, 1997.
[7380] 1481. Yin, W.; Smiley, E.; Germiller, J.; Mechan, R. P.; Florer, J. B.; Wenstrup, R. J.; Bonadio, J.: Isolation of a novel latent transforming growth factor-beta binding protein gene (LTBP-3). J. Biol. Chem. 270:10147-10160, 1995.
[7381] 1482. Bussemakers, M. J. G.; van Bokhoven, A.; Voller, M.; Smit, F. P.; Schalken, J. A.: The genes for the calcium-dependent cell adhesion molecules P- and E-cadherin are tandemly arranged in the human genome. Biochem. Biophys. Res. Commun. 203: 1291-1294, 1994.
[7382] 1483. Carmeliet, P.; Lampugnani, M.-G.; Moons, L.; Breviario, F.; Compernolle, V.; Bono, F.; Balconi, G.; Spagnuolo, R.; Oosthuyse, B.; Dewerchin, M.; Zanetti, A.; Angellilo, A.; and 11 others: Targeted deficiency of cytosolic truncation of the VE-cadherin gene in mice impairs VEGF-mediated endothelial survival and angiogenesis. Cell 98: 147-157, 1999.
[7383] 1484. Huber, P.; Dalmon, J.; Engiles, J.; Breviario, F.; Gory, S.; Siracusa, L. D.; Buchberg, A. M.; Dejana, E.: Genomic structure and chromosomal mapping of the mouse VE-cadherin gene (Cdh5). Genomics 32: 21-28, 1996.
[7384] 1485. Salomon, D.; Ayalon, O.; Patel-King, R.; Hynes, R. O.; Geiger, B.: Extrajunctional distribution of N-cadherin in cultured human endothelial cells. J. Cell Sci. 102: 7-17, 1992.
[7385] 1486. Castagnola, P.; Gennari, M.; Morello, R.; Tonachini, L.; Marin, O.; Gaggero, A.; Cancedda, R.: Cartilage associated protein (CASP) is a novel developmentally regulated chick embryo protein. J. Cell Sci. 110: 1351-1359, 1997.
[7386] 1487. Morello, R.; Tonachini, L.; Monticone, M.; Viggiano, L.; Rocchi, M.; Cancedda, R.; Castagnola, P.: cDNA cloning, characterization and chromosome mapping of Crtap encoding the mouse cartilage associated protein. Matrix Biol. 18: 319-324, 1999.
[7387] 1488. Tonachini, L.; Morello, R.; Monticone, M.; Skaug, J.; Scherer, S. W.; Cancedda, R.; Castagnola, P.: cDNA cloning, characterization and chromosome mapping of the gene encoding human cartilage associated protein (CRTAP). Cytogenet. Cell Genet. 87: 191-194, 1999.
[7388] 1489. Shibanuma, M.; Mashimo, J.; Mita, A.; Kuroki, T.; Nose, K.: Cloning from a mouse osteoblastic cell line of a set of transforming-growth-factor-beta-1-regulated genes, one of which seems to encode a follistatin-related polypeptide. Europ. J. Biochem. 217: 13-19, 1993.
[7389] 1490. Tanaka, M.; Ozaki, S.; Osakada, F.; Mori, K.; Okubo, M.; Nakao, K.: Cloning of follistatin-related protein as a novel autoantigenin systemic rheumatic diseases. Int. Immun. 10: 1305-1314, 1998.
[7390] 1491. Zwijsen, A.; Blockx, H.; van Arnhem, W.; Willems, J.; Fransen, L.; Devos, K.; Raymackers, J.; van de Voorde, A.; Slegers, H.: Characterization of a rat C6 glioma-secreted follistatin-related protein (FRP): cloning and sequence of the human homologue. Europ. J. Biochem. 225: 937-946, 1994.
[7391] 1492. Bartles, J. R.; Wierda, A.; Zheng, L.: Identification and characterization of espin, an actin-binding protein localized to the F-actin-rich junctional plaques of Sertoli cell ectoplasmic specializations. J. Cell Sci. 109:1229-1239, 1996.
[7392] 1493. Bartles, J. R.; Zheng, L.; Li, A.; Wierda, A.; Chen, B.: Smallespin: a third actin-bundling protein and potential forked protein ortholog in brush border microvilli. J. Cell Biol. 143: 107-119, 1998.
[7393] 1494. Chen, B.; Li, A.; Wang, D.; Wang, M.; Zheng, L.; Bartles, J. R.: Espin contains an additional actin-binding site in its N terminus and is a major actin-bundling protein of the Sertoli cell-spermatidectoplasmic specialization junctional plaque. Molec. Biol. Cell 10:4327-4339, 1999.
[7394] 1495. Zheng, L.; Sekerkova, G.; Vranich, K.; Tilney, L. G.; Mugnaini, E.; Bartles, J. R.: The deaf jerker mouse has a mutation in the geneen coding the espin actin-bundling proteins of hair cell stereocilia and lacks espins. Cell 102: 377-385, 2000.
[7395] 1496. Parker, N. J.; Begley, C. G.; Smith, P. J.; Fox, R. M.: Molecular cloning of a novel human gene (D11S4896E) at chromosomal region 11p15.5. Genomics 37:253-256, 1996.
[7396] 1497. Sabbioni, S.; Veronese, A.; Trubia, M.; Taramelli, R.; Barbanti-Brodano, G.; Croce, C. M.; Negrini, M.: Exon structure and promoter identification of STIM1 (alias GOK), a human gene causing growth arrest of the human tumor cell lines G401 and RD. Cytogenet. Cell. Genet. 86: 214-218, 1999.
[7397] 1498. Cao, H.; Hegele, R. A.: Identification of single-nucleotide polymorphisms in the human LPIN1 gene. J. Hum. Genet. 47: 370-372, 2002.
[7398] 1499. Peterfy, M.; Phan, J.; Xu, P.; Reue, K.: Lipodystrophy in the fld mouse results from mutation of a new gene encoding a nuclear protein, lipin. Nature Genet. 27: 121-124, 2001.
[7399] 1500. Reue, K.; Xu, P.; Wang, X.-P.; Slavin, B. G.: Adipose tissue deficiency, glucose intolerance, and increased atherosclerosis result from mutation in the mouse fatty liver dystrophy (fld) gene. J. Lipid Res. 41:1067-1076, 2000.
[7400] 1501. Bodine, S. C.; Latres, E.; Baumhueter, S.; Lai, V. K.-M.; Nunez, L.; Clarke, B. A.; Poueymirou, W. T.; Panaro, F. J.; Na, E.; Dharmarajan, K.; Pan, Z.-Q.; Valenzuela, D. M.; DeChiara, T. M.; Stitt, T. N.; Yancopoulos, G. D.; Glass, D. J.: Identification of ubiquitin ligases required for skeletal muscle atrophy. Science 294: 1704-1708, 2001.
[7401] 1502. Centner, T.; Yano, J.; Kimura, E.; McElhinny, A. S.; Pelin, K.; Witt, C. C.; Bang, M.-L.; Trombitas, K.; Granzier, H.; Gregorio, C. C.; Sorimachi, H.; Labeit, S.: Identification of muscle specific ring finger proteins as potential regulators of the titin kinase domain. J. Molec. Biol. 306: 717-726, 2001.
[7402] 1503. Kirikoshi, H.; Koike, J.; Sagara, N.; Saitoh, T.; Tokuhara, M.; Tanaka, K.; Sekihara, H.; Hirai, M.; Katoh, M.: Molecular cloning and genomic structure of human Frizzled-3 at chromosome 8p21. Biochem. Biophys. Res. Commun. 271: 8-14, 2000.
[7403] 1504. Sala, C. F.; Formenti, E.; Terstappen, G. C.; Caricasole, A.: Identification, gene structure, and expression of human frizzled-3(FZD3). Biochem. Biophys. Res. Commun. 273: 27-34, 2000.
[7404] 1505. Chen, H.; Ross, C. A.; Wang, N.; Huo, Y.; MacKinnon, D. F.; Potash, J. B.; Simpson, S. G.; McMahon, F. J.; DePaulo, J. R., Jr.; Mcinnis, M. G.: NEDD4L on human chromosome 18q21 has multiple forms of transcripts and is a homologue of the mouse Nedd-4-2 gene. Europ. J. Hum. Genet. 9:922-930, 2001.
[7405] 1506. Erdeniz, N.; Rothstein, R.: Rsp5, a ubiquitin-protein ligase, is involved in degradation of the single-stranded-DNA binding protein Rfa1 in Saccharomyces cerevisiae. Molec. Cell. Biol. 20: 224-232, 2000.
[7406] 1507. Bement, W. M.; Wirth, J. A.; Mooseker, M. S.: Cloning and mRNA expression of human unconventional myosin-IC: a homologue of amoeboidmyosins-I with a single IQ motif and an SH3 domain. J. Molec. Biol. 243:356-363, 1994.
[7407] 1508. Dry, K.; Kenwrick, S.; Rosenthal, A.; Platzer, M.: The complete sequence of the human locus for NgCAM-related cell adhesion moleculere veals a novel alternative exon in chick and man and conserved genomic organization for the L1 subfamily. Gene 273: 115-122, 2001.
[7408] 1509. Grumet, M.; Mauro, V.; Burgoon, M. P.; Edelman, G. M.; Cunningham, B. A.: Structure of a new nervous system glycoprotein, Nr-CAM, and its relationship to subgroups of neural cell adhesion molecules. J. Cell. Biol. 113: 1399-1412, 1991.
[7409] 1510. Kayyem, J. F.; Roman, J. M.; de la Rosa, E. J.; Schwarz, U.; Dreyer, W. J.: Bravo/Nr-CAM is closely related to the cell adhesion molecules L1 and Ng-CAM and has a similar heterodimer structure. J. Cell. Biol. 118:1259-1270, 1992.
[7410] 1511. Lane, R. P.; Chen, X.-N.; Yamakawa, K.; Vielmetter, J.; Korenberg, J. R.; Dreyer, W. J.: Characterization of a highly conserved human homolog to the chicken neural cell surface protein Bravo/Nr-CAM that maps to chromosome band 7q31. Genomics 35: 456-465, 1996.
[7411] 1512. Wang, B.; Williams, H.; Du, J.-S.; Terrett, J.; Kenwrick, S.: Alternative splicing of human NrCAM in neural and nonneural tissues. Molec. Cell. Neurosci. 10: 287-295, 1998.
[7412] 1513. Damen, J. E.; Liu, L.; Rosten, P.; Humphries, R. K.; Jefferson, A. B.; Majerus, P. W.; Krystal, G.: The 145-kDa protein induced to associate with Shc by multiple cytokines is an inositol tetraphosphate and phosphatidylinositol 3,4,5-triphosphate 5-phosphatase. Proc. Nat. Acad. Sci. 93: 1689-1693, 1996.
[7413] 1514. Drayer, A. L.; Pesesse, X.; De Smedt, F.; Woscholski, R.; Parker, P.; Erneux, C.: Cloning and expression of a human placenta inositol 1,3,4,5-tetrakisphosphate and phosphatidylinositol 3,4,5-triphosphate5-phosphatase. Biochem. Biophys. Res. Commun. 225: 243-249, 1996.
[7414] 1515. Helgason, C. D.; Damen, J. E.; Rosten, P.; Grewal, R.; Sorensen, P.; Chappel, S. M.; Borowski, A.; Jirik, F.; Krystal, G.; Humphries, R. K.: Targeted disruption of SHIP leads to hemopoietic perturbations, lung pathology, and a shortened life span. Genes Dev. 12: 1610-1620, 1998.
[7415] 1516. Huber, M.; Helgason, C. D.; Damen, J. E.; Liu, L.; Humphries, R. K.; Krystal, G.: The src homology 2-containing inositol phosphatase (SHIP) is the gatekeeper of mast cell degranulation. Proc. Nat. Acad. Sci. 95: 11330-11335, 1998.
[7416] 1517. Kavanaugh, W. M.; Pot, D. A.; Chin, S. M.; Deuter-Reinhard, M.; Jefferson, A. B.; Norris, F. A.; Masiarz, F. R.; Cousens, L. S.; Majerus, P. W.; Williams, L. T.: Multiple forms of an inositol polyphosphate5-phosphatase form signaling complexes with Shc and Grb2. Curr. Biol. 6: 438-445, 1996.
[7417] 1518. Lioubin, M. N.; Algate, P. A.; Tsai, S.; Carlberg, K.; Aebersold, R.; Rohrschneider, L. R.: p150(Ship), a signal transduction molecule with inositol polyphosphate-5-phosphatase activity. Genes Dev. 10:1084-1095, 1996.
[7418] 1519. Liu, Q.; Amgen EST Program; Dumont, D. J.: Molecular cloning and chromosomal localization in human and mouse of the SH2-containing inositol phosphatase, INPP5D (SHIP). Genomics 39: 109-112, 1997.
[7419] 1520. Liu, Q.; Shalaby, F.; Jones, J.; Bouchard, D.; Dumont, D. J.: The 5H2-containing inositol polyphosphate 5-phosphatase, Ship, is expressed during hematopoiesis and spermatogenesis. Blood 91: 2753-2759, 1998.
[7420] 1521. Takeshita, S.; Namba, N.; Zhao, J. J.; Jiang, Y.; Genant, H. K.; Silva, M. J.; Brodt, M. D.; Helgason, C. D.; Kalesnikoff, J.; Rauh, M. J.; Humphries, R. K.; Krystal, G.; Teitelbaum, S. L.; Ross, F. P.: SHIP-deficient mice are severely osteoporotic due to increased numbers of hyper-resorptive osteoclasts. Nature Med. 8: 943-949, 2002.
[7421] 1522. Wang, J.-W.; Howson, J. M.; Ghansah, T.; Desponts, C.; Ninos, J. M.; May, S. L.; Nguyen, K. H. T.; Toyama-Sorimachi, N.; Kerr, W. G.: Influence of SHIP on the NK repertoire and allogeneic bone marrow transplantation. Science 295: 2094-2097, 2002.
[7422] 1523. Ware, M. D.; Rosten, P.; Damen, J. E.; Liu, L.; Humphries, R. K.; Krystal, G.: Cloning and characterization of human SHIP, the 145-kD inositol 5-phosphatase that associates with SHC after cytokine stimulation. Blood 88: 2833-2840, 1996.
[7423] 1524. Stegmaier, K.; Pendse, S.; Barker, G. F.; Bray-Ward, P.; Ward, D. C.; Montgomery, K. T.; Krauter, K. S.; Reynolds, C.; Sklar, J.; Donnelly, M.; Bohlander, S. K.; Rowley, J. D.; Sallan, S. E.; Gilliland, D. G.; Golub, T. R.: Frequent loss of heterozygosity at the TEL gene locus in acute lymphoblastic leukemia of childhood. Blood 86: 38-44, 1995.
[7424] 1525. Chen, C.-F.; Chen, Y.; Dai, K.; Chen, P.-L.; Riley, D. J.; Lee, W.-H.: A new member of the hsp90 family of molecular chaperones interacts with the retinoblastoma protein during mitosis and after heat shock. Molec. Cell. Biol. 16: 4691-4699, 1996.
[7425] 1526. Felts, S. J.; Owen, B. A. L.; Nguyen, P.; Trepel, J.; Donner, D. B.; Toft, D. O.: The hsp90-related protein TRAP1 is a mitochondrial protein with distinct functional properties. J. Biol. Chem. 275:3305-3312, 2000.
[7426] 1527. Song, H. Y.; Dunbar, J. D.; Zhang, Y. X.; Guo, D.; Donner, D. B.: Identification of a protein with homology to hsp90 that binds the type 1 tumor necrosis factor receptor. J. Biol. Chem. 270: 3574-3581, 1995.
[7427] 1528. Bates, E. E. M.; Dieu, M.-C.; Ravel, O.; Zurawski, S. M.; Patel, S.; Bridon, J.-M.; Ait-Yahia, S.; Vega, F., Jr.; Banchereau, J.; Lebecque, S.: CD40L activation of dendritic cells down-regulates DORA, a novel member of the immunoglobulin superfamily. Molec. Immun. 35: 513-524, 1998.
[7428] 1529. Bates, E. E. M.; Kissenpfennig, A.; Peronne, C.; Mattei, M.-G.; Fossiez, F.; Malissen, B.; Lebecque, S.: The mouse and human IGSF6(DORA) genes map to the inflammatory bowel disease 1 locus and are embedded in an intron of a gene of unknown function. Immunogenetics 52:112-120, 2000.
[7429] 1530. Koesters, R.; Adams, V.; Betts, D.; Moos, R.; Schmid, M.; Siermann, A.; Hassam, S.; Weitz, S.; Lichter, P.; Heitz, P. U.; von Knebel Doeberitz, M.; Briner, J.: Human eukaryotic initiation factor EIF2C1 gene: cDNA sequence, genomic organization, localization to chromosomal bands 1q34-p35, and expression. Genomics 61: 210-218, 1999.
[7430] 1531. Martinez, J.; Patkaniowska, A.; Urlaub, H.; Luhrmann, R.; Tuschi, T.: Single-stranded antisense siRNAs guide target RNA cleavage in RNAi. Cell 110: 563-574, 2002.
[7431] 1532. Hanaoka, E.; Ozaki, T.; Ohira, M.; Nakamura, Y.; Suzuki, M.; Takahashi, E.; Moriya, H.; Nakagawara, A.; Sakiyama, S.: Molecular cloning and expression analysis of the human DA41 gene and its mapping to chromosome 9q21.2-q21.3. J. Hum. Genet. 45: 188-191, 2000.
[7432] 1533. Ozaki, T.; Hishiki, T.; Toyama, Y.; Yuasa, S.; Nakagawara, A.; Sakiyama, S.: Identification of a new cellular protein that can interact specifically with DAN. DNA Cell Biol. 16: 985-991, 1997.
[7433] 1534. Akhmanova, A.; Hoogenraad, C. C.; Drabek, K.; Stepanova, T.; Dortland, B.; Verkerk, T.; Vermeulen, W.; Burgering, B. M.; De Zeeuw, C. I.; Grosveld, F.; Galjart, N.: CLASPs are CLIP-115 and -170 associating proteins involved in the regional regulation of microtubule dynamics in motile fibroblasts. Cell 104: 923-935, 2001.
[7434] 1535. Cattanach, B. M.; Barr, J. A.; Beechey, C. V.; Martin, J.; Noebels, J.; Jones, J.: A candidate model for Angelman syndrome in the mouse. Mammalian Genome 8: 472-478, 1997.
[7435] 1536. Dhar, M.; Webb, L. S.; Smith, L.; Hauser, L.; Johnson, D.; West, D. B.: A novel ATPase on mouse chromosome 7 is a candidate gene for increased body fat. Physiol. Genomics 4: 93-100, 2000.
[7436] 1537. Halleck, M. S.; Lawler, J. F., Jr.; Blackshaw, S.; Gao, L.; Nagarajan, P.; Hacker, C.; Pyle, S.; Newman, J. T.; Nakanishi, Y.; Ando, H.; Weinstock, D.; Williamson, P.; Schlegel, R. A.: Differential expression of putative transbilayer amphipath transporters. Physiol. Genomics 1:139-150, 1999.
[7437] 1538. Loftus, B. J.; Kim, U.-J.; Sneddon, V. P.; Kalush, F.; Brandon, R.; Fuhrmann, J.; Mason, T.; Crosby, M. L.; Barnstead, M.; Cronin, L.; Mays, A. D.; Cao, Y.; Xu, R. X.; Kang, H.-L.; Mitchell, S.; Eichler, E. E.; Harris, P. C.; Venter, J. C.; Adams, M. D.: Genome duplications and other features in 12 Mb of DNA sequence from human chromosome 16p and 16q. Genomics 60: 295-308, 1999.
[7438] 1539. Asada, H.; Kawamura, Y.; Maruyama, K.; Kume, H.; Ding, R.-G.; Kanbara, N.; Kuzume, H.; Sanbo, M.; Yagi, T.; Obata, K.: Cleft palate and decreased brain gamma-aminobutyric acid in mice lacking the 67-kDa isoform of glutamic acid decarboxylase. Proc. Nat. Acad. Sci. 94:6496-6499, 1997.
[7439] 1540. Brilliant, M. H.; Szabo, G.; Katarova, Z.; Kozak, C. A.; Glaser, T. M.; Greenspan, R. J.; Housman, D. E.: Sequences homologous to glutamic acid decarboxylase cDNA are present on mouse chromosomes 2 and 10. Genomics 6: 115-122, 1990.
[7440] 1541. Bu, D.-F.; Tobin, A. J.: The exon-intron organization of the genes (GAD1 and GAD2) encoding two human glutamate decarboxylases (GAD-67 and GAD-65) suggests that they derive from a common ancestral GAD. Genomics 21:222-228, 1994.
[7441] 1542. Condie, B. G.; Bain, G.; Gottlieb, D. I.; Capecchi, M. R.: Cleft palate in mice with a targeted mutation in the gamma-aminobutyric acid-producing enzyme glutamic acid decarboxylase 67. Proc. Nat. Acad. Sci. 94: 11451-11455, 1997.
[7442] 1543. Erlander, M. G.; Tillakaratne, N. J. K.; Feldblum, S.; Patel, N.; Tobin, A. J.: Two genes encode distinct glutamate decarboxylases. Neuron 7:91-100, 1991.
[7443] 1544. Kelly, C. D.; Edwards, Y.; Johnstone, A. P.; Harfst, E.; Nogradi, A.; Nussey, S. S.; Povey, S.; Carter, N. D.: Nucleotide sequence and chromosomal assignment of a cDNA encoding the large isoform of human glutamate decarboxylase. Ann. Hum. Genet. 56: 255-265, 1992.
[7444] 1545. Krishnamoorthy, K. S.: Pyridoxine-dependency seizure: report of a rare presentation. Ann. Neurol. 13: 103-104, 1983.
[7445] 1546. Sparkes, R. S.; Kaufman, D. L.; Heinzmann, C.; Tobin, A. J.; Mohandas, T.: Brain glutamate decarboxylase (GAD) gene assigned to human chromosome 2 by somatic cell hybrid analysis. (Abstract) Cytogenet. Cell Genet. 46:696 only, 1987.
[7446] 1547. Charng, M.-J.; Zhang, D.; Kinnunen, P.; Schneider, M. D.: A novel protein distinguishes between quiescent and activated forms of the type I transforming growth factor beta receptor. J. Biol. Chem. 273:9365-9368, 1998.
[7447] 1548. Wurthner, J. U.; Frank, D. B.; Felici, A.; Green, H. M.; Cao, Z.; Schneider, M. D.; McNally, J. G.; Lechleider, R. J.; Roberts, A. B.: Transforming growth factor-beta receptor-associated protein 1 is a Smad4 chaperone. J. Biol. Chem. 276: 19495-19502, 2001.
[7448] 1549. Nagase, T.; Nakayama, M.; Nakajima, D.; Kikuno, R.; Ohara, O.: Prediction of the coding sequences of unidentified human genes. XX. The complete sequences of 100 new cDNA clones from brain which code for large proteins in vitro. DNA Res. 8: 85-95, 2001.
[7449] 1550. Toda, T.; Iida, A.; Miwa, T.; Nakamura, Y.; Imai, T.: Isolation and characterization of a novel gene encoding nuclear protein at a locus (D11S636) tightly linked to multiple endocrine neoplasia type 1 (MEN1). Hum. Molec. Genet. 3: 465-470, 1994.
[7450] 155. Spicer, A. P.; Augustine, M. L.; McDonald, J. A.: Molecular cloning and characterization of a putative mouse hyaluronan synthase. J. Biol. Chem. 271: 23400-23406, 1996.
[7451] 1552. Faure, S.; Meyer, L.; Costagliola, D.; Vaneensberghe, C.; Genin, E.; Autran, B.; French ALT and IMMUNOCO Study Groups; Delfraisay, J.-F.; SEROCO Study Group; McDermott, D. H.; Murphy, P. M.; Debre, P.; Theodorou, I.; Cambadiere, C.: Rapid progression to AIDS in HIV+individuals with a structural variant of the chemokine receptor CX(3)CR1. Science 287:2274-2277, 2000.
[7452] 1553. Imai, T.; Hieshima, K.; Haskell, C.; Baba, M.; Nagira, M.; Nishimura, M.; Kakizaki, M.; Takagi, S.; Nomiyama, H.; Schall, T. J.; Yoshie, O.: Identification and molecular characterization of fractalkine receptor CX3CR1, which mediates both leukocyte migration and adhesion. Cell 91:521-530, 1997.
[7453] 1554. Moatti, D.; Faure, S.; Fumeron, F.; Amara, M. E. W.; Seknadji, P.; McDermott, D. H.; Debre, P.; Aumont, M. C.; Murphy, P. M.; deprost, D.; Combadiere, C.: Polymorphism in the fractalkine receptor CX3CR1 as a genetic risk factor for coronary artery disease. Blood 97:1925-1928, 2001.
[7454] 1555. Raport, C. J.; Schweickart, V. L.; Eddy, R. L., Jr.; Shows, T. B.; Gray, P. W.: The orphan G-protein-coupled receptor-encoding gene V28 is closely related to genes for chemokine receptors and is expressed in lymphoid and neural tissues. Gene 163: 295-299, 1995.
[7455] 1556. Tripp, R. A.; Jones, L. P.; Haynes, L. M.; Zheng, H.; Murphy, P. M.; Anderson, L. J.: CX3C chemokine mimicry by respiratory syncytial virus G glycoprotein. Nature Immun. 2: 732-738, 2001.
[7456] 1557. Park, W. S.; Lee, J. H.; Shin, M. S.; Park, J. Y.; Kim, H. S.; Lee, J. H.; Kim, Y. S.; Lee, S. N.; Xiao, W.; Park, C. H.; Lee, S. H.; Yoo, N. J.; Lee, J. Y.: Inactivating mutations of the caspase-10 gene in gastric cancer. Oncogene 21: 2919-2925, 2002.
[7457] 1558. Shin, M. S.; Kim, H. S.; Kang, C. S.; Park, W. S.; Kim, S. Y.; Lee, S. N.; Lee, J. H.; Park, J. Y.; Jang, J. J.; Kim, C. W.; Kim, S. H.; Lee, J. Y.; Yoo, N. J.; Lee, S. H.: Inactivating mutations of CASP10 gene in non-Hodgkin lymphomas. Blood 99: 4094-4099, 2002.
[7458] 1559. Vincenz, C.; Dixit, V. M.: Fas-associated death domain protein interleukin-1-beta-converting enzyme 2 (FLICE2), an ICE/Ced-3 homologue, is proximally involved in CD95- and p55-mediated death signaling. J. Biol. Chem. 272: 6578-6583, 1997.
[7459] 1560. Wang, J.; Chun, H. J.; Wong, W.; Spencer, D. M.; Lenardo, M. J.: Caspase-10 is an initiator caspase in death receptor signaling. Proc. Nat. Acad. Sci. 98: 13884-13888, 2001.
[7460] 1561. Wang, J.; Zheng, L.; Lobito, A.; Chan, F. K.; Dale, J.; Sneller, M.; Yao, X.; Puck, J. M.; Straus, S. E.; Lenardo, M. J.: Inherited human caspase 10 mutations underlie defective lymphocyte and dendritic cell apoptosis in autoimmune lymphoproliferative syndrome type II. Cell 98:47-58, 1999.
[7461] 1562. Nagase, T.; Kikuno, R.; Nakayama, M.; Hirosawa, M.; Ohara, O.: Prediction of the coding sequences of unidentified human genes. XVIII. The complete sequences of 100 new cDNA clones from brain which code for large proteins in vitro. DNA Res. 7: 273-281, 2000.
[7462] 1563. Nagase, T.; Ishikawa, K.; Miyajima, N.; Tanaka, A.; Kotani, H.; Nomura, N.; Ohara, O.: Prediction of the coding sequences of unidentified human genes. IX. The complete sequences of 100 new cDNA clones from brain which can code for large proteins in vitro. DNA Res. 5: 31-39, 1998.
[7463] 1564. Herzing, L. B. K.; Kim, S.-J.; Cook, E. H., Jr.; Ledbetter, D. H.: The human aminophospholipid-transporting ATPase gene ATP10C maps adjacent to UBE3A and exhibits similar imprinted expression. Am. J. Hum. Genet. 68: 1501-1505, 2001.
[7464] 1565. Dunlevy, J. R.; Berryhill, B. L.; Vergnes, J.-P.; Sundar-Raj, N.; Hassell, J. R.: Cloning, chromosomal localization, and characterization of cDNA from a novel gene, SH3BP4, expressed by human corneal fibroblasts. Genomics 62:519-524, 1999.
[7465] 1566. Wong, W. T.; Schumacher, C.; Salcini, A. E.; Romano, A.; Castagnino, P.; Pelicci, P. G.; DiFiore, P. P.: A protein-binding domain, EH, identified in the receptor tyrosine kinase substrate Eps15 and conserved in evolution. Proc. Nat. Acad. Sci. 92: 9530-9534, 1995.
[7466] 1567. Meguro, M.; Kashiwagi, A.; Mitsuya, K.; Nakao, M.; Kondo, I.; Saitoh, S.; Oshimura, M.: A novel maternally expressed gene, ATP10C, encodes a putative aminophospholipid translocase associated with Angelman syndrome. Nature Genet. 28: 19-20, 2001.
[7467] 1568. Hampe, J.; Grebe, J.; Nikolaus, S.; Solberg, C.; Croucher, P. J. P.; Mascheretti, S.; Jahnsen, J.; Moum, B.; Klump, B.; Krawczak, M.; Mirza, M. M.; Foelsch, U. R.; Vatn, M.; Schreiber, S.: Association of NOD2 (CARD 15) genotype with clinical course of Crohn's disease: a cohort study. Lancet 359: 1661-1665, 2002.
[7468] 1569. Hugot, J.-P.; Chamaillard, M.; Zouali, H.; Lesage, S.; Cezard, J.-P.; Belaiche, J.; Almer, S.; Tysk, C.; O'Morain, C. A.; Gassull, M.; Binder, V.; Finkel, Y.; and 8 others: Association of NOD2 leucine-rich repeat variants with susceptibility to Crohn's disease. Nature 411:599-603, 2001.
[7469] 1570. Murillo, L.; Crusius, J. B. A.; van Bodegraven, A. A.; Alizadeh, B. Z.; Pena, A. S.: CARD15 gene and the classification of Crohn's disease. Immunogenetics 54: 59-61, 2002.
[7470] 1571. Ogura, Y.; Bonen, D. K.; Inohara, N.; Nicolae, D. L.; Chen, F. F.; Ramos, R.; Britton, H.; Moran, T.; Karaliuskas, R.; Duerr, R. H.; Achkar, J.-P.; Brant, S. R.; Bayless, T. M.; Kirschner, B. S.; Hanauer, S. B.; Nunez, G.; Cho, J. H.: A frame shift mutation in Nod2 associated with susceptibility to Crohn's disease. Nature 411: 603-606, 2001.
[7471] 1572. Ogura, Y.; Inohara, N.; Benito, A.; Chen, F. F.; Yamaoka, S.; Nunez, G.: Nod2, a Nodl/Apaf-1 family member that is restricted to monocytes and activates NF kappa-B. J. Biol. Chem. 276: 4812-4818, 2001.
[7472] 1573. Lesage, S.; Zouali, H.; Cezard, J.-P.; EPWG-IBD Group; Colombel, J.-F.; EPIMAD Group; Belaiche, J.; GETAID Group; Almer, S.; Tysk, C.; O'Morain, C.; Gassull, M.; Binder, V.; Finkel, Y.; Modigliani, R.; Gower-Rousseau, C.; Macry, J.; Merlin, F.; Chamaillard, M.; Jannot, A.-S.; Thomas, G.; Hugot, J.-P.: CARD15/NOD2 mutational analysis and genotype-phenotype correlation in 612 patients with inflammatory bowel disease. Am. J. Hum. Genet. 70: 845-857, 2002.
[7473] 1574. van Heel, D. A.; McGovern, D. P. B.; Cardon, L. R.; Dechairo, B. M.; Lench, N. J.; Carey, A. H.; Jewell, D. P.: Fine mapping of the IBD1 locus did not identify Crohn disease-associated NOD2 variants: implications for complex disease genetics. Am. J. Med. Genet. 111:253-259, 2002.
[7474] 1575. Vermeire, S.; Wild, G.; Kocher, K.; Cousineau, J.; Dufresne, L.; Bitton, A.; Langelier, D.; Pare, P.; Lapointe, G.; Cohen, A.; Daly, M. J.; Rioux, J. D.: CARD15 genetic variation in a Quebec population: prevalence, genotype-phenotype relationship, and haplotype structure. Am. J. Hum. Genet. 71: 74-83, 2002.
[7475] 1576. Yamazaki, K.; Takazoe, M.; Tanaka, T.; Kazumori, T.; Nakamura, Y.: Absence of mutation in the NOD2/CARD15 gene among 483 Japanese patients with Crohn's disease. J. Hum. Genet. 47: 469-472, 2002.
[7476] 1577. Chong, S. S.; Tanigami, A.; Roschke, A. V.; Ledbetter, D. H.: 14-3-3-epsilon has no homology to LIS1 and lies telomeric to it on chromosome 17p13.3 outside the Miller-Dieker syndrome chromosome region. Genome Res. 6: 735-741, 1996.
[7477] 1578. Conklin, D. S.; Galaktionov, K.; Beach, D.: 14-3-3 proteins associate with cdc25 phosphatases. Proc. Nat. Acad. Sci. 92: 7892-7896, 1995.
[7478] 1579. Jin, D.-Y.; Lyu, M. S.; Kozak, C. A.; Jeang, K.-T.: Function of 14-3-3 proteins. Nature 382: 308 only, 1996.
[7479] 1580. Luk, S. C. W.; Garcia-Barcelo, M.; Tsui, S. K. W.; Fung, K. P.; Lee, C. Y.; Waye, M. M. Y.: Assignment of the human 14-3-3 epsilon isoform (YWHAE) to human chromosome 17p13 by in situ hybridization. Cytogenet. Cell Genet. 78: 105-106, 1997.
[7480] 1581. Slentz-Kesler, K.; Moore, J. T.; Lombard, M.; Zhang, J.; Hollingsworth, R.; Weiner, M. P.: Identification of the human Mnk2 gene (MKNK2) through protein interaction with estrogen receptor beta. Genomics 69:63-71, 2000.
[7481] 1582. Li, Y.; He, X.; Schembri-King, J.; Jakes, S.; Hayashi, J.: Cloning and characterization of human Lnk, an adaptor protein with pleckstrin homology and Src homology 2 domains that can inhibit T cell activation. J. Immun. 164: 5199-5206, 2000.
[7482] 1583. Takaki, S.; Sauer, K.; Iritani, B. M.; Chien, S.; Ebihara, Y.; Tsuji, K.; Takatsu, K.; Perlmutter, R. M.: Control of B cell production by the adaptor protein Lnk: definition of a conserved family of signal-modulating proteins. Immunity 13: 599-609, 2000.
[7483] 1584. Burmeister, M.; Meyer, G. E.: The trefoil gene maps to mouse chromosome 17. Mammalian Genome 8: 223-224, 1997.
[7484] 1585. Chinery, R.; Williamson, J.; Poulsom, R.: The gene encoding human intestinal trefoil factor (TFF3) is located on chromosome 21q22.3 clustered with other members of the trefoil peptide family. Genomics 32:281-284, 1996.
[7485] 1586. Mashimo, H.; Wu, D.-C.; Podolsky, D. K.; Fishman, M. C.: Impaired defense of intestinal mucosa in mice lacking intestinal trefoil factor. Science 274:262-265, 1996.
[7486] 1587. Podolsky, D. K.; Lynch-Devaney, K.; Stow, J. L.; Oates, P.; Murgue, B.; DeBeaumont, M.; Sands, B. E.; Mahida, Y. R.: Identification of human intestinal trefoil factor: goblet cell-specific expression of a peptide targeted for apical secretion. J. Biol. Chem. 268: 6694-6702, 1993.
[7487] 1588. Probst, J. C.; Zetzsche, T.; Weber, M.; Theilemann, P.; Skutella, T.; Landgraf, R.; Jirikowski, G. F.: Human intestinal trefoil factor is expressed in human hypothalamus and pituitary: evidence for a novel neuropeptide. FASEB J. 10: 1518-1523, 1996.
[7488] 1589. Schmitt, H.; Wundrack, I.; Beck, S.; Gott, P.; Welter, C.; Shizuya, H.; Simon, M. I.; Blin, N.: A third P-domain peptide gene (TFF3), human intestinal trefoil factor, maps to 21q22.3. Cytogenet. Cell Genet. 72: 299-302, 1996.
[7489] 1590. Taupin, D.; Wu, D.-C.; Jeon, W.-K.; Devaney, K.; Wang, T. C.; Podolsky, D. K.: The trefoil gene family are coordinately expressed immediate-early genes: EGF receptor- and MAP kinase-dependent inter regulation. J. Clin. Invest. 103: R31-R38, 1999.
[7490] 1591. Thim, L.: A new family of growth factor-like peptides: ‘trefoil’ disulphide loop structures as a common feature in breast cancer associated peptide (pS2), pancreatic spasmolytic polypeptide (PSP), and frog skin peptides (spasmolysins). FEBS Lett. 250: 85-90, 1989.
[7491] 1592. England, S. K.; Uebele, V. N.; Kodali, J.; Bennett, P. B.; Tamkun, M. M.: A novel K+ channel beta-subunit (hKv-beta-1.3) is produced via alternative mRNA splicing. J. Biol. Chem. 270: 28531-28534, 1995.
[7492] 1593. Aubry, F.; Mattei, M.-G.; Barque, J.-P.; Galibert, F.: Chromosomal localization and expression pattern of the RNase L inhibitor gene. FEBS Lett. 381: 135-139, 1996.
[7493] 1594. Diriong, S.; Salehzada, T.; Bisbal, C.; Martinand, C.; Taviaux, S.: Localization of the ribonuclease L inhibitor gene (RNS41), anew member of the interferon-regulated 2-5A pathway, to 4q31 by fluorescencein situ hybridization. Genomics 32: 488-490, 1996.
[7494] 1595. Pizzuti, A.; Amati, F.; Calabrese, G.; Mari, A.; Colosimo, A; Silani, V.; Giardino, L.; Ratti, A.; Penso, D.; Calza, L.; Palka, G.; Scarlato, G.; Novelli, G.; Dallapicolla, B.: cDNA characterization and chromosomal mapping of two human homologs of the Drosophila dishevelled polarity gene. Hum. Molec. Genet. 5: 953-958, 1996.
[7495] 1596. Semenov, M. V.; Snyder, M.: Human dishevelled genes constitute a DHR-containing multigene family. Genomics 42: 302-310, 1997.
[7496] 1597. Carson-Walter, E. B.; Watkins, D. N.; Nanda, A.; Vogelstein, B.; Kinzler, K. W.; St. Croix, B.: Cell surface tumor endothelial markers are conserved in mice and humans. Cancer Res. 61: 6649-6655, 2001.
[7497] 1598. St. Croix, B.; Rago, C.; Velculescu, V.; Traverso, G.; Romans, K. E.; Montgomery, E.; Lal, A.; Riggins, G. J.; Lengauer, C.; Vogelstein, B.; Kinzler, K. W.: Genes expressed in human tumor endothelium. Science 289:1197-1202, 2000.
[7498] 1599. Gosling, J.; Dairaghi, D. J.; Wang, Y.; Hanley, M.; Talbot, D.; Miao, Z.; Schall, T. J.: Cutting edge: identification of a novel chemokine receptor that binds dendritic cell- and T cell-active chemokines including ELC, SLC, and TECK. J. Immun. 164: 2851-2856, 2000.
[7499] 1600. Hadjantonakis, A.-K.; Formstone, C. J.; Little, P. F. R.: mCelsr1 is an evolutionarily conserved seven-pass transmembrane receptor and is expressed during mouse embryonic development. Mech. Dev. 78:91-95, 1998.
[7500] 1601. Hadjantonakis, A.-K.; Sheward, W. J.; Harmar, A. J.; de Galan, L.; Hoovers, J. M. N.; Little, P. F. R.: Celsrl, a neural-specific gene encoding an unusual seven-pass transmembrane receptor, maps to mouse chromosome 15 and human chromosome 22qter. Genomics 45: 97-104, 1997.
[7501] 1602. Chai, J.; Du, C.; Wu, J.-W.; Kyin, S.; Wang, X.; Shi, Y.: Structural and biochemical basis of apoptotic activation by Smac/DIABLO. Nature 406:855-862, 2000.
[7502] 1603. Du, C.; Fang, M.; Li, Y.; Li, L.; Wang, X.: Smac, a mitochondrial protein that promotes cytochrome c-dependent caspase activation by eliminating IAP inhibition. Cell 102: 33-42, 2000.
[7503] 1604. Okada, H.; Suh, W.-K.; Jin, J.; Woo, M.; Du, C.; Elia, A.; Duncan, G. S.; Wakeham, A.; Itie, A.; Lowe, S. W.; Wang, X.; Mak, T. W.: Generation and characterization of Smac/DIABLO-deficient mice. Molec. Cell. Biol. 22: 3509-3517, 2002.
[7504] 1605. Scott, A. F.: Personal Communication. Baltimore, Md. Aug. 18, 2000.
[7505] 1606. Verhagen, A. M.; Ekert, P. G.; Pakusch, M.; Silke, J.; Connolly, L. M.; Reid, G. E.; Moritz, R. L.; Simpson, R. J.; Vaux, D. L.: Identification of DIABLO, a mammalian protein that promotes apoptosis by binding to and antagonizing IAP proteins. Cell 102: 43-53, 2000.
[7506] 1607. Bousquet, O.; Basseville, M.; Vila-Porcile, E.; Billette de Villemeur, T.; Hauw, J.-J.; Landrieu, P.; Portier, M.-M.: Aggregation of a subpopulation of vimentin filaments in cultured human skin fibroblasts derived from patients with giant axonal neuropathy. Cell. Motil. Cytoskeleton 33:115-129, 1996.
[7507] 1608. Kuhlenbaumer, G.; Young, P.; Oberwittler, C.; Hunermund, G.; Schirmacher, A.; Domschke, K.; Ringelstein, B.; Stogbauer, F.: Giant axonal neuropathy (GAN): case report and two novel mutations in the gigaxonin gene. Neurology 58:1273-1276, 2002. Note: Erratum: Neurology 58: 1444, 2002.
[7508] 1609. Pena, S. D.: Giant axonal neuropathy: an inborn error of organization of intermediate filaments. Muscle Nerve 5: 166-172, 1982.
[7509] 1610. Prineas, J. W.; Ouvrier, R. A.; Wright, R. G.; Walsh, J. C.; McLeod, J. G.: Giant axonal neuropathy: a generalized disorder of cytoplasmic microfilament formation. J. Neuropath. Exp. Neurol. 35: 458-470, 1976.
[7510] 1611. Scott, A. F.: Personal Communication. Baltimore, Md. Mar. 13, 2001.
[7511] 1612. Mansharamani, M.; Hewetson, A.; Chilton, B. S.: Cloning and characterization of an a typical type IV P-type ATPase that binds to the RING motif of RUSH transcription factors. J. Biol. Chem. 276: 3641-3649, 2001.
[7512] 1613. Bullrich, F.; Druck, T.; Kunapuli, P.; Gomez, J.; Gripp, K. W.; Schlegelberger, B.; Lasota, J.; Aronson, M.; Cannizzaro, L. A.; Huebner, K.; Benovic, J. L.: Chromosomal mapping of the genes GPRK5 and GPRK6 encoding G protein-coupled receptor kinases GRK5 and GRK6. Cytogenet. Cell Genet. 70: 250-254, 1995.
[7513] 1614. Haribabu, B.; Snyderman, R.: Identification of additional members of human G-protein-coupled receptor kinase multigene family. Proc. Nat. Acad. Sci. 90: 9398-9402, 1993.
[7514] 1615. Hasson, T.; Skowron, J. F.; Gilbert, D. J.; Avraham, K. B.; Perry, W. L.; Bement, W. M.; Anderson, B. L.; Sherr, E. H.; Chen, Z.-Y.; Greene, L. A.; Ward, D. C.; Corey, D. P.; Mooseker, M. S.; Copeland, N. G.; Jenkins, N. A.: Mapping of unconventional myosins in mouse and human. Genomics 36: 431-439, 1996.
[7515] 1616. Laporte, J.; Hu, L. J.; Kretz, C.; Mandel, J.-L.; Kioschis, P.; Coy, J. F.; Klauck, S. M.; Poustka, A.; Dahl, N.: A gene mutated in X-linked myotubular myopathy defines a new putative tyrosine phosphatase family conserved in yeast. Nature Genet. 13: 175-182, 1996.
[7516] 1617. Chambost, H.; Van Baren, N.; Brasseur, F.; Godelaine, D.; Xerri, L.; Landi, S. J.; Theate, I.; Plumas, J.; Spagnoli, G. C.; Michel, G.; Coulie, P. G.; Olive, D.: Expression of gene MAGE-A4 in Reed-Sternberg cells. Blood 95: 3530-3533, 2000.
[7517] 1618. Offenberg, H. H.; Schalk, J. A. C.; Meuwissen, R. L. J.; van Aalderen, M.; Kester, H. A.; Dietrich, A. J. J.; Heyting, C.: SCP2: a major protein component of the axial elements of synaptonemal complexes of the rat. Nucleic Acids Res. 26: 2572-2579, 1998.
[7518] 1619. Schalk, J. A. C.; Offenberg, H. H.; Peters, E.; Groot, N. P. B.; Hoovers, J. M. N.; Heyting, C.: Isolation and characterization of the human SCP2 cDNA and chromosomal localization of the gene. Mammalian Genome 10: 642-644, 1999.
[7519] 1620. Hatamura, I.; Kanauchi, Y.; Takahara, M.; Fujiwara, M.; Muragaki, Y.; Ooshima, A.; Ogino, T.: A nonsense mutation in TRPS1 in a Japanese family with trichorhino-phalangeal syndrome type I. (Letter) Clin. Genet. 59: 366-367, 2001.
[7520] 1621. Hilton, M. J.; Sawyer, J. M.; Gutierrez, L.; Hogart, A.; Kung, T. C.; Wells, D. E.: Analysis of novel and recurrent mutations responsible for the tricho-rhino-phalangeal syndromes. J. Hum. Genet. 47: 103-106, 2002.
[7521] 1622. Schinkmann, K.; Blenis, J.: Cloning and characterization of a human STE20-like protein kinase with unusual cofactor requirements. J. Biol. Chem. 272: 28695-28703, 1997.
[7522] 1623. Zhou, T.-H.; Ling, K.; Guo, J.; Zhou, H.; Wu, Y.-L.; Jing, Q.; Ma, L.; Pei, G.: Identification of a human brain-specific isoform of mammalian STE20-like kinase 3 that is regulated by cAMP-dependent protein kinase. J. Biol. Chem. 275: 2513-2519, 2000.
[7523] 1624. Ono, Y.; Ohno, M.; Shimura, Y.: Identification of a putative RNA helicase (HRH1), a human homolog of yeast Prp22. Molec. Cell. Biol. 14:7611-7620, 1994.
[7524] 1625. Wang, Y.; Cortez, D.; Yazdi, P.; Neff, N.; Elledge, S. J.; Qin, J.: BASC, a super complex of BRCA1-associated proteins involved in the recognition and repair of aberrant DNA structures. Genes Dev. 14:927-939, 2000.
[7525] 1626. Thim, L.; Woldike, H. F.; Nielsen, P. F.; Christensen, M.; Lynch-Devaney, K.; Podolsky, D. K.: Characterization of human and rat intestinal trefoil factor produced in yeast. Biochemistry 34: 4757-4764, 1995.
[7526] 1627. Kimura, S.; Hara, Y.; Pineau, T.; Fernandez-Salguero, P.; Fox, C. H.; Ward, J. M.; Gonzalez, F. J.: The T/ebp null mouse: thyroid-specificen hancer-binding protein is essential for the organogenesis of the thyroid, lung, ventral forebrain, and pituitary. Genes Dev. 10:60-69, 1996.
[7527] 1628. Fernandes-Alnemri, T.; Armstrong, R. C.; Krebs, J.; Srinivasula, S. M.; Wang, L.; Bullrich, F.; Fritz, L. C.; Trapani, J. A.; Tomaselli, K. J.; Litwack, G.; Alnemri, E. S.: In vitro activation of CPP32 and Mch3 by Mch4, a novel human apoptotic cysteine protease containing two FADD-like domains. Proc. Nat. Acad. Sci. 93: 7464-7469, 1996.
[7528] 1629. Levkau, B.; Koyama, H.; Raines, E. W.; Clurman, B. E.; Herren, B.; Orth, K.; Roberts, J. M.; Ross, R.: Cleavage of p21(Cip1/Waf1) and p27(Kip1) mediates apoptosis in endothelial cells through activation of Cdk2: role of a caspase cascade. Molec. Cell 1: 553-563, 1998.
[7529] 1630. Nasir, J.; Theilmann, J. L.; Chopra, V.; Jones, A. M.; Walker, D.; Rasper, D. M.; Vaillancourt, J. P.; Hewitt, J. E.; Nicholson, D. W.; Hayden, M. R.: Localization of the cell death genes CPP32 and Mch-2 to human chromosome 4q. Mammalian Genome 8: 56-59, 1997.
[7530] 1631. Tiso, N.; Pallavicini, A.; Muraro, T.; Zimbello, R.; Apolloni, E.; Valle, G.; Lanfranchi, G.; Danieli, G. A.: Chromosomal localization of the human genes, CPP32, Mch2, Mch3, and Ich-1, involved in cellular apoptosis. Biochem. Biophys. Res. Commun. 225: 983-989, 1996.
[7531] 1632. Hopfner, K.-P.; Karcher, A.; Craig, L.; Woo, T. T.; Carney, J. P.; Tainer, J. A.: Structural biochemistry and interaction architecture of the DNA double-strand break repair Mre11 nuclease and Rad50-ATPase. Cell 105:473-485, 2001.
[7532] 1633. Stracker, T. H.; Carson, C. T.; Weitzman, M. D.: Adenovirus oncoproteins inactivate the Mre11-Rad50-NBS1 DNA repair complex. Nature 418:348-352, 2002.
[7533] 1634. Zhong, Q.; Chen, C.-F.; Li, S.; Chen, Y.; Wang, C.-C.; Xiao, J.; Chen, P.-L.; Sharp, Z. D.; Lee, W.-H.: Association of BRCA1 with the hRad50-hMre11-p95 complex and the DNA damage response. Science 285:747-750, 1999.
[7534] 1635. Zhu, X.-D.; Kuster, B.; Mann, M.; Petrini, J. H. J.; de Lange, T.: Cell-cycle-regulated association of RAD50/MRE11/NBS1 with TRF2 and human telomeres. Nature Genet. 25: 347-352, 2000.
[7535] 1636. Lin, Q.; Schwarz, J.; Bucana, C.; Olson, E. N.: Control of mouse cardiac morphogenesis and myogenesis by transcription factor MEF2C. Science 276:1404-1407, 1997.
[7536] 1637. Fernandes-Alnemri, T.; Litwack, G.; Alnemri, E. S.: Mch2, a new member of the apoptotic Ced-3/Ice cysteine protease gene family. Cancer Res. 55: 2737-2742, 1995.
[7537] 1638. Orth, K.; Chinnaiyan, A. M.; Garg, M.; Froelich, C. J.; Dixit, V. M.: The CED-3/ICE-like protease Mch2 is activated during apoptosis and cleaves the death substrate Iamin A. J. Biol. Chem. 271: 16443-16446, 1996.
[7538] 1639. Verhaegh, G. W. C. T.; Jongmans, W.; Jaspers, N. G. J.; Natarajan, A. T.; Oshimura, M.; Lohman, P. H. M.; Zdzienicka, M. Z.: A gene that regulates DNA replication in response to DNA damage is located on human chromosome 4q. Am. J. Hum. Genet. 57: 1095-1103, 1995.
[7539] 1640. De Plaen, E.; Arden, K.; Traversari, C.; Gaforio, J. J.; Szikora, J.-P.; De Smet, C.; Brasseur, F.; van der Bruggen, P.; Lethe, B.; Lurquin, C.; Brasseur, R.; Chomez, P.; De Backer, O.; Cavenee, W.; Boon, T.: Structure, chromosomal localization, and expression of 12 genes of the MAGE family. Immunogenetics 40: 360-369, 1994.
[7540] 1641. Rogner, U. C.; Wilke, K.; Steck, E.; Korn, B.; Poustka, A.: Themelanoma antigen gene (MAGE) family is clustered in the chromosomal band Xq28. Genomics 29: 725-731, 1995.
[7541] 1642. McDermott, J. C.; Cardoso, M. C.; Yu, Y.-T.; Andres, V.; Leifer, D.; Krainc, D.; Lipton, S. A.; Nadal-Ginard, B.: hMEF2C gene encodes skeletal muscle- and brain-specific transcription factors. Molec. Cell. Biol. 13: 2564-2577, 1993.
[7542] 1643. Emes, R. D.; Ponting, C. P.: A new sequence motif linking lissencephaly, Treacher Collins and oral-facial-digital type 1 syndromes, microtubule dynamics and cell migration. Hum. Molec. Genet. 10: 2813-2820, 2001.
[7543] 1644. Laporte, J.; Blondeau, F.; Buj-Bello, A.; Tentler, D.; Kretz, C.; Dahl, N.; Mandel, J.-L.: Characterization of the myotubular in dual specificity phosphatase gene family from yeast to human. Hum. Molec. Genet. 7: 1703-1712, 1998.
[7544] 1645. Borggrefe, T.; Masat, L.; Wabl, M.; Riwar, B.; Cattoretti, G.; Jessberger, R.: Cellular, intracellular, and developmental expression patterns of murine SWAP-70. Europ. J. Immun. 29: 1812-1822, 1999.
[7545] 1646. Borggrefe, T.; Wabl, M.; Akhmedov, A. T.; Jessberger, R.: A B-cell-specific DNA recombination complex. J. Biol. Chem. 273: 17025-17035, 1998.
[7546] 1647. Masat, L.; Caldwell, J.; Armstrong, R.; Khoshnevisan, H.; Jessberger, R.; Herndier, B.; Wabl, M.; Ferrick, D.: Association of SWAP-70 with the B cell antigen receptor complex. Proc. Nat. Acad. Sci. 97: 2180-2184, 2000.
[7547] 1648. Masat, L.; Liddell, R. A.; Mock, B. A.; Kuo, W.-L.; Jessberger, R.; Wabl, M.; Morse, H. C., III: Mapping of the SWAP70 gene to mouse chromosome 7 and human chromosome 11p15. Immunogenetics 51: 16-19, 2000.
[7548] 1649. Shinohara, M.; Terada, Y.; Iwamatsu, A.; Shinohara, A.; Mochizuki, N.; Higuchi, M.; Gotoh, Y.; Ihara, S.; Nagata, S.; Itoh, H.; Fukui, Y.; Jessberger, R.: SWAP-70 is a guanine-nucleotide-exchange factor that mediates signalling of membrane ruffling. Nature 416: 759-763, 2002.
[7549] 1650. Kamimoto, T.; Zama, T.; Aoki, R.; Muro, Y.; Hagiwara, M.: Identification of a novel kinesin-related protein, KRMP1, as a target for mitotic peptidyl-prolyl isomerase Pin1. J. Biol. Chem. 276: 37520-37528, 2001.
[7550] 1651. Ansel, K. M.; Harris, R. B. S.; Cyster, J. G.: CXCL13 is required for B1 cell homing, natural antibody production, and body cavity immunity. Immunity 16:67-76, 2002.
[7551] 1652. Gunn, M. D.; Ngo, V. N.; Ansel, K. M.; Ekland, E. H.; Cyster, J. G.; Williams, L. T.: A B-cell-homing chemokine made in lymphoid follicles activates Burkitt's lymphoma receptor-1. Nature 391: 799-803, 1998.
[7552] 1653. Legler, D. F.; Loetscher, M.; Roos, R. S.; Clark-Lewis, I.; Baggiolini, M.; Moser, B.: B cell-attracting chemokine 1, a human CXC chemokine expressed in lymphoid tissues, selectively attracts B lymphocytes via BLR1/CXCR5. J. Exp. Med. 187: 655-660, 1998.
[7553] 1654. Oh, J.; Takahashi, R.; Kondo, S.; Mizoguchi, A.; Adachi, E.; Sasahara, R. M.; Nishimura, S.; Imamura, Y.; Kitayama, H.; Alexander, D. B.; Ide, C.; Horan, T. P.; Arakawa, T.; Yoshida, H.; Nishikawa, S.; Itoh, Y.; Seiki, M.; Itohara, S.; Takahashi, C.; Noda, M.: The membrane-anchored MMP inhibitor RECK is a key regulator of extracellular matrix integrity and angiogenesis. Cell 107: 789-800, 2001.
[7554] 1655. Takahashi, C.; Sheng, Z.; Horan, T. P.; Kitayama, H.; Maki, M.; Hitomi, K.; Kitaura, Y.; Takai, S.; Sasahara, R. M.; Horimoto, A.; Ikawa, Y.; Ratzkin, B. J.; Arakawa, T.; Noda, M.: Regulation of matrix metalloproteinase-9 and inhibition of tumor invasion by the membrane-anchored glycoprotein RECK. Proc. Nat. Acad. Sci. 95: 13221-13226, 1998.
[7555] 1656. Nagase, T.; Ishikawa, I.; Nakajima, D.; Ohira, M.; Seki, N.; Miyajima, N.; Tanaka, A.; Kotani, H.; Nomura, N.; O'Hara, O.: Prediction of the coding sequences of unidentified human genes. VII. The complete sequences of 100 new cDNA clones from brain which can code for large proteins in vitro. DNA Res. 4: 141-150, 1997.
[7556] 1657. Muto, A.; Hoshino, H.; Madisen, L.; Yanai, N.; Obinata, M.; Karasuyama, H.; Hayashi, N.; Nakauchi, H.; Yamamoto, M.; Groudine, M.; Igarashi, K.: Identification of Bach2 as a B-cell-specific partner for small Maf proteins that negatively regulate the immunoglobulin heavy chain gene 3-prime enhancer. EMBO J. 17: 5734-5743, 1998.
[7557] 1658. Sasaki, S.; Ito, E.; Toki, T.; Maekawa, T.; Kanezaki, R.; Umenai, T.; Muto, A.; Nagai, H.; Kinoshita, T.; Yamamoto, M.; Inazawa, J.; Taketo, M. M.; Nakahata, T.; Igarashi, K.; Yokoyama, M.: Cloning and expression of human B cell-specific transcription factor BACH2 mapped to chromosome 6q15. Oncogene 19: 3739-3749, 2000.
[7558] 1659. Amagai, M.; Wang, Y.; Minoshima, S.; Kawamura, K.; Green, K. J.; Nishikawa, T.; Shimizu, N.: Assignment of the human genes for desmocollin 3 (DSC3) and desmocollin 4 (DSC4) to chromosome 18q12. Genomics 25:330-332, 1995.
[7559] 1660. Kawamura, K.; Watanabe, K.; Suzuki, T.; Yamakawa, T.; Kamiyama, T.; Nakagawa, H.; Tsurufuji, S.: cDNA cloning and expression of a novel human desmocollin. J. Biol. Chem. 269: 26295-26302, 1994.
[7560] 1661. King, I. A.; Sullivan, K. H.; Bennett, R., Jr.; Buxton, R. S.: The desmocollins of human foreskin epidermis: identification and chromosomal assignment of a third gene and expression patterns of the three isoforms. J. Invest. Derm. 105: 314-321, 1995.
[7561] 1662. Hoop, R. C.; Russo, L. S.; Riconda, D. L.; Schwartz, L. S.; Hoffman, E. P.: Restoration of half the normal dystrophin sequence in a double-deletion Duchenne muscular dystrophy family. Am. J. Med. Genet. 49: 323-327, 1994.
[7562] 1663. Burger, J.; Fonknechten, N.; Hoeltzenbein, M.; Neumann, L.; Bratanoff, E.; Hazan, J.; Reis, A.: Hereditary spastic paraplegia caused by mutations in the SPG4 gene. Europ. J. Hum. Genet. 8: 771-776, 2000.
[7563] 1664. Burger, J.; Metzke, H.; Paternotte, C.; Schilling, F.; Hazan, J.; Reis, A.: Autosomal dominant spastic paraplegia with anticipation maps to a 4-cM interval on chromosome 2p21-p24 in a large German family. Hum. Genet. 98: 371-375, 1996.
[7564] 1665. Errico, A.; Ballabio, A.; Rugarli, E. I.: Spastin, the protein mutated in autosomal dominant hereditary spastic paraplegia, is involved in microtubule dynamics. Hum. Molec. Genet. 11: 153-163, 2002.
[7565] 1666. Lindsey, J. C.; Lusher, M. E.; McDermott, C. J.; White, K. D.; Reid, E.; Rubinsztein, D. C.; Bashir, R.; Hazan, J.; Shaw, P. J.; Bush by, K. M. D.: Mutation analysis of the spastin gene (SPG4) inpatients with hereditary spastic paraplegia. J. Med. Genet. 37:759-765, 2000.
[7566] 1667. Takahashi, N.; Tuiki, H.; Saya, H.; Kaibuchi, K.: Localization of the gene coding for ROCK II/Rho kinase on human chromosome 2p24. Genomics 55:235-237, 1999.
[7567] 1668. Kedra, D.; Pan, H.-Q.; Seroussi, E.; Fransson, I.; Guilbaud, C.; Collins, J. E.; Dunham, I.; Blennow, E.; Roe, B. A.; Piehl, F.; Dumanski, J. P.: Characterization of the human synaptogyrin gene family. Hum. Genet. 103: 131-141, 1998.
[7568] 1669. Hazan, J.; Davoine, C. S.; Mavel, D.; Fonknechten, N.; Paternotte, C.; Fizames, C.; Cruaud, C.; Samson, D.; Muselet, D.; Vega-Czarny, N.; Brice, A.; Gyapay, G.; Heilig, R.; Fontaine, B.; Weissenbach, J.: A fine integrated map of the SPG4 locus excludes an expanded CAG repeat in chromosome 2p-linked autosomal dominant spastic paraplegia. Genomics 60:309-319, 1999.
[7569] 1670. Hazan, J.; Fonknechten, N.; Mavel, D.; Paternotte, C.; Samson, D.; Artiguenave, F.; Davoine, C.-S.; Cruaud, C.; Durr, A.; Wincker, P.; Brottier, P.; Cattolico, L.; Barbe, V.; Burgunder, J.-M.; Prud'homme, J.-F.; Brice, A.; Fontaine, B.; Heilig, R.; Weissenbach, J.: Spastin, a new AAA protein, is altered in the most frequent form of autosomal dominant spastic paraplegia. Nature Genet. 23: 296-303, 1999.
[7570] 1671. Lee, M. P.; Brandenburg, S.; Landes, G. M.; Adams, M.; Miller, G.; Feinberg, A. P.: Two novel genes in the center of the 11p15 imprinted domain escape genomic imprinting. Hum. Molec. Genet. 8: 683-690, 1999.
[7571] 1672. Nakayama, M.; Nakajima, D.; Nagase, T.; Nomura, N.; Seki, N.; Ohara, O.: Identification of high-molecular-weight proteins with multiple EGF-like motifs by motif-trap screening. Genomics 51: 27-34, 1998.
[7572] 1673. Wu, Q.; Maniatis, T.: Large exons encoding multiple ectodomains are a characteristic feature of protocadherin genes. Proc. Nat. Acad. Sci. 97: 3124-3129, 2000.
[7573] 1674. Conklin, D. C.; Rixon, M. W.; Kuestner, R. E.; Maurer, M. F.; Whitmore, T. E.; Millar, R. P.: Cloning and gene expression of a novel human ribonucleoprotein. Biochim. Biophys. Acta 1492: 465-469, 2000.
[7574] 1675. Kataoka, N.; Yong, J.; Kim, V. N.; Velazquez, F.; Perkinson, R. A.; Wang, F.; Dreyfuss, G.: Pre-mRNA splicing imprints mRNA in the nucleus with a novel RNA-binding protein that persists in the cytoplasm. Molec. Cell 6: 673-682, 2000.
[7575] 1676. Salicioni, A. M.; Xi. M.; Vanderveer, L. A.; Balsara, B.; Testa, J. R.; Dunbrack, R. L., Jr.; Godwin, A. K.: Identification and structural analysis of human RBM8A and RBM8B: two highly conserved RNA-binding motif proteins that interact with OVCA1, a candidate tumor suppressor. Genomics 69:54-62, 2000.
[7576] 1677. Zhao, X.-F.; Nowak, N. J.; Shows, T. B.; Aplan, P. D.: MAGOH interacts with a novel RNA-binding protein. Genomics 63: 145-148, 2000.
[7577] 1678. Caira, F.; Antonson, P.; Pelto-Huikko, M.; Treuter, E.; Gustafsson, J.-A.: Cloning and characterization of RAP250, a novel nuclear receptor coactivator. J. Biol. Chem. 275: 5308-5317, 2000.
[7578] 1679. Guan, X. Y.; Xu, J.; Anzick, S. L.; Zhang, H.; Trent, J. M.; Meltzer, P. S.: Hybrid selection of transcribed sequences from microdissected DNA: isolation of genes within amplified region at 20q11-q13.2 in breast cancer. Cancer Res. 56: 3446-3450, 1996.
[7579] 1680. Ko, L.; Cardona, G. R.; Chin, W. W.: Thyroid hormone receptor-binding protein, an LXXLL motif-containing protein, functions as a general coactivator. Proc. Nat. Acad. Sci. 97: 6212-6217, 2000.
[7580] 1681. Lee, S.-K.; Anzick, S. L.; Choi, J.-E.; Bubendorf, L.; Guan, X.-Y.; Jung, Y.-K.; Kallioniemi, O. P.; Kononen, J.; Trent, J. M.; Azorsa, D.; Jhun, B.-H.; Cheong, J. H.; Lee, Y. C.; Meltzer, P. S.; Lee, J. W.: A nuclear factor, ASC-2, as a cancer-amplified transcriptional coactivator essential for ligand-dependent transactivation by nuclear receptors in vivo. J. Biol. Chem. 274: 34283-34293, 1999.
[7581] 1682. Mahajan, M. A.; Samuels, H. H: A new family of nuclear receptor coregulators that integrate nuclear receptor signaling through CREB-binding protein. Molec. Cell. Biol. 20: 5048-5063, 2000.
[7582] 1683. Zhu, Y.; Kan, L.; Qi, C.; Kanwar, Y. S.; Yeldandi, A. V.; Rao, M. S.; Reddy, J. K.: Isolation and characterization of peroxisome proliferator-activated receptor (PPAR) interacting protein (PRIP) as a coactivator for PPAR. J. Biol. Chem. 275: 13510-13516, 2000.
[7583] 1684. Hirosawa, M.; Nagase, T.; Ishikawa, K.; Kikuno, R.; Nomura, N.; Ohara, O.: Characterization of cDNA clones selected by the Gene Mark analysis from size-fractionated cDNA libraries from human brain. DNARes. 6: 329-336, 1999.
[7584] 1685. Battini, J.-L.; Rasko, J. E. J.; Miller, A. D.: A human cell-surface receptor for xenotropic and polytropic murine leukemia viruses: possible role in G protein-coupled signal transduction. Proc. Nat. Acad. Sci. 96:1385-1390, 1999.
[7585] 1686. Levy, J. A.: Xenotropism: the elusive viral receptor finally uncovered. Proc. Nat. Acad. Sci. 96: 802-804, 1999.
[7586] 1687. Tailor, C. S.; Nouri, A.; Lee, C. G.; Kozak, C.; Kabat, D.: Cloning and characterization of a cell surface receptor for xenotropic and polytropic murine leukemia viruses. Proc. Nat. Acad. Sci. 96: 927-932, 1999.
[7587] 1688. Yang, Y.-L.; Guo, L.; Xu, S.; Holland, C. A.; Kitamura, T.; Hunter, K.; Cunningham, J. M.: Receptors for polytropic and xenotropic mouse leukaemia viruses encoded by a single gene at Rmc1. Nature Genet. 21:216-219, 1999.
[7588] 1689. Hart, M. J.; Callow, M. G.; Souza, B.; Polakis, P.: IQGAP1, a calmodulin-binding protein with a ras GAP-related domain, is a potential effector for cdc42Hs. EMBO J. 15: 2997-3005, 1996.
[7589] 1690. Sugimoto, N.; Imoto, I.; Fukuda, Y.; Kurihara, N.; Kuroda, S.; Tanigami, A.; Kaibuchi, K.; Kamiyama, R.; Inazawa, J.: IQGAP1, a negative regulator of cell-cell adhesion, is upregulated by gene amplification at 15q26 in gastric cancer cell lines HSC39 and 40A. J. Hum. Genet. 46:21-25, 2001.
[7590] 1691. Weissbach, L.; Settleman, J.; Kalady, M. F.; Snijders, A. J.; Murthy, A. E.; Yan, Y.-X.; Bernards, A.: Identification of a human RasGAP-related protein containing calmodulin-binding motifs. J. Biol. Chem. 269:20517-20521, 1994.
[7591] 1692. Ashford, M. L. J.; Bond, C. T.; Blair, T. A.; Adelman, J. P.: Cloning and functional expression of a rat heart KATP channel. Nature 370:456-459, 1994.
[7592] 1693. Bond, C. T.; Pessia, M.; Xia, X.-M.; Lagrutta, A.; Kavanaugh, M. P.; Adelman, J. P.: Cloning and expression of a family of inward rectifier potassium channels. Receptors Channels 2: 183-191, 1994.
[7593] 1694. Tucker, S. J.; James, M. R.; Adelman, J. P.: Assignment of K(ATP)-1, the cardiac ATP-sensitive potassium channel gene (KCNJ5), to human chromosome 11q24. Genomics 28: 127-128, 1995.
[7594] 1695. Wickman, K.; Seldin, M. F.; Gendler, S. J.; Clapham, D. E.: Partial structure, chromosome localization, and expression of the mouse Girk4 gene. Genomics 40: 395-401, 1997.
[7595] 1696. Jenkins, N. A.: Personal Communication. Frederick, Md. May 12, 1997.
[7596] 1697. Zhang, Y.; Sun, Z.-W.; Iratni, R.; Erdjument-Bromage, H.; Tempst, P.; Hampsey, M.; Reinberg, D.: SAP30, a novel protein conserved between human and yeast, is a component of a histone deacetylase complex. Molec. Cell 1: 1021-1031, 1998.
[7597] 1698. Radice, P.; Pensotti, V.; Jones, C.; Perry, H.; Pierotti, M. A.; Tunnacliffe, A.: The human archain gene, ARCN1, has highly conserved homologs in rice and Drosophila. Genomics 26: 101-106, 1995.
[7598] 1699. Tunnacliffe, A.; van de Vrugt, H.; Pensotti, V.; Radice, P.: The coatomer protein delta-COP, encoded by the archain gene, is conserved across diverse eukaryotes. Mammalian Genome 7: 784-786, 1996.
[7599] 1700. Langer, L. O., Jr.; Cervenka, J.; Camargo, M.: A severe autosomal recessive acromesomelic dysplasia, the Hunter-Thompson type, and comparison with the Grebe type. Hum. Genet. 81: 323-328, 1989.
[7600] 1701. Robin, N. H.: Personal Communication. Cleveland, Ohio Nov. 3, 1997.
[7601] 1702. Runner, M. N.: Linkage of brachypodism: a new member of linkage group V of the house mouse. J. Hered. 50: 81-84, 1959.
[7602] 1703. Thomas, J. T.; Lin, K.; Nandedkar, M.; Camargo, M.; Cervenka, J.; Luyten, F. P.: A human chondrodysplasia due to a mutation in a TGF-beta superfamily member. Nature Genet. 12: 315-317, 1996.
[7603] 1704. Tsumaki, N.; Tanaka, K.; Arikawa-Hirasawa, E.; Nakase, T.; Kimura, T.; Thomas, J. T.; Ochi, T.; Luyten, F. P.; Yamada, Y.: Role of CDMP-1 in skeletal morphogenesis: promotion of mesenchymal cell recruitment and chondrocyte differentiation. J. Cell Biol. 144: 161-173, 1999.
[7604] 1705. Huh, T.-L.; Kim, Y.-O.; Oh, I.-U.; Song, B. J.; Inazawa, J.: Assignment of the human mitochondrial NAD(+)-specific isocitrate dehydrogenase alpha subunit (IDH3A) gene to 15q25.1-q25.2 by in situ hybridization. Genomics 31:295-296, 1996.
[7605] 1706. Kim, Y.-O.; Oh, I.-U.; Park, H.-S.; Jeng, J.; Song, B. J.; Huh, T.-L.: Characterization of a cDNA clone for human NAD(+)-specific isocitrate dehydrogenase alpha-subunit and structural comparison with its isoenzymes from different species. Biochem. J. 308: 63-68, 1995.
[7606] 1707. Arinami, T.; Kondo, I.; Hamaguchi, H.; Nakajima, S.: Multifocal meningiomas in a patient with a constitutional ring chromosome 22. J. Med. Genet. 23: 178-180, 1986.
[7607] 1708. Petrella, R.; Levine, S.; Wilmot, P. L.; Ashar, K. D.; Casamassima, A. C.; Shapiro, L. R.: Multiple meningiomas in a patient with constitutional ring chromosome 22. Am. J. Med. Genet. 47: 184-186, 1993.
[7608] 1709. Peyrard, M.; Fransson, I.; Xie, Y.-G.; Han, F.-Y.; Ruttledge, M. H.; Swahn, S.; Collins, J. E.; Dunham, I.; Collins, V. P.; Dumanski, J. P.: Characterization of a new member of the human beta-adaptin gene family from chromosome 22q12, a candidate meningioma gene. Hum. Molec. Genet. 3: 1393-1399, 1994.
[7609] 1710. Peyrard, M.; Pan, H.-Q.; Kedra, D.; Fransson, I.; Swahn, S.; Hartman, K.; Clifton, S. W.; Roe, B. A.; Dumanski, J. P.: Structure of the promoter and genomic organization of the human beta-prime-adaptin gene (BAM22) from chromosome 22q12. Genomics 36: 112-117, 1996.
[7610] 1711. Zankl, H.; Zang, K. D.: Correlations between clinical and cytogenetical data in 180 human meningiomas. Cancer Genet. Cytogenet. 1: 351-356, 1980.
[7611] 1712. Harvey, K. F.; Dinudom, A.; Cook, D. I.; Kumar, S.: The Nedd-4-like protein KIAA0439 is a potential regulator of the epithelial sodium channel. J. Biol. Chem. 276: 8597-8601, 2001.
[7612] 1713. Lees, J. A.; Saito, M.; Vidal, M.; Valentine, M.; Look, T.; Harlow, E.; Dyson, N.; Helin, K.: The retinoblastoma protein binds to a family of E2F transcription factors. Molec. Cell. Biol. 13: 7813-7825, 1993.
[7613] 1714. Cloud, J. E.; Rogers, C.; Reza, T. L.; Ziebold, U.; Stone, J. R.; Picard, M. H.; Caron, A. M.; Bronson, R. T.; Lees, J. A.: Mutant mouse models reveal the relative roles of E2F1 and E2F3 in vivo. Molec. Cell. Biol. 22: 2663-2672, 2002.
[7614] 1715. He, Y.; Armanious, M. K.; Thomas, M. J.; Cress, W. D.: Identification of E2F-3B, an alternative form of E2F-3 lacking a conserved N-terminal region. Oncogene 19: 3422-3433, 2000.
[7615] 1716. Halford, M. M.; Armes, J.; Buchert, M.; Meskenaite, V.; Grail, D.; Hibbs, M. L.; Wilks, A. F.; Farlie, P. G.; Newgreen, D. F.; Hovens, C. M.; Stacker, S. A.: Ryk-deficient mice exhibit craniofacial defects associated with perturbed Eph receptor crosstalk. Nature Genet. 25:414-418, 2000.
[7616] 1717. Nakamura, S.; Stock, D. W.; Wydner, K. L.; Bollekens, J. A.; Takeshita, K.; Nagai, B. M.; Chiba, S.; Kitamura, T.; Freeland, T. M.; Zhao, Z.; Minowada, J.; Lawrence, J. B.; Weiss, K. M.; Ruddle, F. H.: Genomic analysis of a new mammalian distal-less gene: Dlx7. Genomics 38:314-324, 1996.
[7617] 1718. Fuhlbrigge, R. C.; Kieffer, J. D.; Armerding, D.; Kupper, T. S.: Cutaneous lymphocyte antigen is a specialized form of PSGL-1 expressed on skin-homing T cells. Nature 389: 978-981, 1997.
[7618] 1719. Herron, M. J.; Nelson, C. M.; Larson, J.; Snapp, K. R.; Kansas, G. S.; Goodman, J. L.: Intracellular parasitism by the human granulocytic ehrlichiosis bacterium through the P-selectin ligand, PSGL-1. Science 288:1653-1656, 2000.
[7619] 1720. Veldman, G. M.; Bean, K. M.; Cumming, D. A.; Eddy, R. L.; Sait, S. N. J.; Shows, T. B.: Genomic organization and chromosomal localization of the gene encoding human P-selectin glycoprotein ligand. J. Biol. Chem. 270: 16470-16475, 1995.
[7620] 1721. Yang, J.; Galipeau, J.; Kozak, C. A.; Fu rie, B. C.; Fu rie, B.: Mouse P-selectin glycoprotein ligand-1: molecular cloning, chromosomal localization, and expression of a functional P-selectin receptor. Blood 87:4176-4186, 1996.
[7621] 1722. Schwientek, T.; Nomoto, M.; Levery, S. B.; et al: Control of O-glycan branch formation. J. Biol. Chem. 274: 4504-4512, 1999.
[7622] 1723. Walczak, H.; Degli-Esposti, M. A.; Johnson, R. S.; Smolak, P. J.; Waugh, J. Y.; Boiani, N.; Timour, M. S.; Gerhart, M. J.; Schooley, K. A.; Smith, C. A.; Goodwin, R. G.; Rauch, C. T.: TRAIL-R2: a novel apoptosis-mediating receptor for TRAIL. EMBO J. 16: 5386-5397, 1997.
[7623] 1724. Wu, G. S.; Burns, T. F.; McDonald, E. R., III; Jiang, W.; Meng, R.; Krantz, I. D.; Kao, G.; Gan, D.-D.; Zhou, J.-Y.; Muschel, R.; Hamilton, S. R.; Spinner, N. B.; Markowitz, S.; Wu, G.; El-Deiry, W. S.: KILLER/DR5 is a DNA damage-inducible p53-regulated death receptor gene. Nature Genet. 17: 141-143, 1997.
[7624] 1725. Tucker, J. E.; Winkfein, R. J.; Cooper, C. B.; Schnetkamp, P. P.: cDNA cloning of the human retinal rod Na—Ca+K exchanger: comparison with a revised bovine sequence. Invest. Ophthal. Vis. Sci. 39: 435-440, 1998.
[7625] 1726. Tucker, J. E.; Winkfein, R. J.; Murthy, S. K.; Friedman, J. S.; Walter, M. A.; Demetrick, D. J.; Schnetkamp, P. P. M.: Chromosomal localization and genomic organization of the human retinal rod Na—Ca+K exchanger. Hum. Genet. 103: 411-414, 1998.
[7626] 1727. Hara, Y.; Wakamori, M.; Ishii, M.; Maeno, E.; Nishida, M.; Yoshida, T.; Yamada, H.; Shimizu, S.; Mori, E.; Kudoh, J.; Shimizu, S.; Kurose, H.; Okada, Y.; Imoto, K.; Mori, Y.: LTRPC2 Ca(2+)-permeable channel activated by changes in redox status confers susceptibility to cell death. Molec. Cell 9: 163-173, 2002.
[7627] 1728. Harteneck, C.; Plant, T. D.; Schultz, G.: From worm to man: three subfamilies of TRP channels. Trends Neurosci. 23: 159-166, 2000.
[7628] 1729. Kudoh, J.; Nagamine, K.; Asakawa, S.; Abe, I.; Kawasaki, K.; Maeda, H.; Tsujimoto, S.; Minoshima, S.; Ito, F.; Shimizu, N.: Localization of 16 exons to a 450-kb region involved in the autoimmune polyglandular disease type I (APECED) on human chromosome 21q22.3. DNA Res. 4:45-52, 1997.
[7629] 1730. Nagamine, K.; Kudoh, J.; Minoshima, S.; Kawasaki, K.; Asakawa, S.; Ito, F.; Shimizu, N.: Molecular cloning of a novel putative Ca(2+) channel protein (TRPC7) highly expressed in brain. Genomics 54:124-131, 1998.
[7630] 1731. Perraud, A.-L.; Fleig, A.; Dunn, C. A.; Bagley, L. A.; Launay, P.; Schmitz, C.; Stokes, A. J.; Zhu, Q.; Bessman, M. J.; Penner, R.; Kinet, J.-P.; Scharenberg, A. M.: ADP-ribose gating of the calcium-permeable LTRPC2 channel revealed by Nudix motif homology. Nature 411: 595-599, 2001.
[7631] 1732. Sano, Y.; Inamura, K.; Miyake, A.; Mochizuki, S.; Yokoi, H.; Matsushime, H.; Furuichi, K.: Immunocyte Ca(2+) influx system mediated by LTRPC2. Science 293:1327-1330, 2001.
[7632] 1733. Cerutti, A.; Schaffer, A.; Goodwin, R. G.; Shah, S.; Zan, H.; Ely, S.; Casali, P.: Engagement of CD153 (CD30 ligand) by CD30-positiveT cells inhibits class switch DNA recombination and antibody production in human IgD-positive IgM-positive B cells. J. Immun. 165: 786-794, 2000.
[7633] 1734. Croager, E. J.; Abraham, L. J.: Characterisation of the human CD30 ligand gene structure. Biochim. Biophys. Acta 1353: 231-235, 1997.
[7634] 1735. Smith, C. A.; Gruss, H.-J.; Davis, T.; Anderson, D.; Farrah, T.; Baker, E.; Sutherland, G. R.; Brannan, C. I.; Copeland, N. G.; Jenkins, N. A.; Grabstein, K. H.; Gliniak, B.; and 9 others: CD30 antigen, a marker for Hodgkin's lymphoma, is a receptor whose ligand defines an emerging family of cytokines with homology to TNF. Cell 73: 1349-1360, 1993.
[7635] 1736. Hurskainen, T. L.; Hirohata, S.; Seldin, M. F.; Apte, S. S.: ADAM-TS5, ADAM-TS6, and ADAM-TS7, novel members of a new family of zinc metalloproteases: general features and genomic distribution of the ADAM-TS family. J. Biol. Chem. 274: 25555-25563, 1999.
[7636] 1737. Gundelfinger, E.: Personal Communication. Madgeburg, FRG. Jan. 8, 1999.
[7637] 1738. Hashida, H.; Goto, J.; Zhao, N.; Takahashi, N.; Hirai, M.; Kanazawa, I.; Sakaki, Y.: Cloning and mapping of ZNF231, a novel brain-specific gene encoding neuronal double zinc finger protein whose expression is enhanced in a neurodegenerative disorder, multiple system atrophy (MSA). Genomics 54: 50-58, 1998.
[7638] 1739. Santorelli, F. M.; Patrono, C.; Fortini, D.; Tessa, A.; Comanducci, G.; Bertini, E.; Pierallini, A.; Amabile, G. A.; Casali, C.: Intrafamilial variability in hereditary spastic paraplegia associated with an SPG4 gene mutation. Neurology 55: 702-705, 2000.
[7639] 1740. Sauter, S.; Miterski, B.; Klimpe, S.; Bonsch, D.; Schols, L.; Visbeck, A.; Papke, T.; Hopf, H. C.; Engel, W.; Deufel, T.; Epplen, J. T.; Neesen, J.: Mutation analysis of the spastin gene (SPG4) inpatients in Germany with autosomal dominant hereditary spastic paraplegia. Hum. Mutat. 20: 127-132, 2002.
[7640] 1741. Svenson, I. K.; Ashley-Koch, A. E.; Pericak-Vance, M. A.; Marchuk, D. A.: A second leaky splice-site mutation in the spastin gene. (Letter) Am. J. Hum. Genet. 69: 1407-1409, 2001.
[7641] 1742. Gee, S.; Krauss, S. W.; Miller, E.; Aoyagi, K.; Arenas, J.; Conboy, J. G.: Cloning of mDEAH9, a putative RNA helicase and mammalian homologue of Saccharomyces cerevisiae splicing factor Prp43. Proc. Nat. Acad. Sci. 94: 11803-11807, 1997.
[7642] 1743. Imamura, O.; Sugawara, M.; Furuichi, Y.: Cloning and characterization of a putative human RNA helicase gene of the DEAH-box protein family. Biochem. Biophys. Res. Commun. 240: 335-340, 1997.
[7643] 1744. Dominguez, O.; Ashhab, Y.; Sabater, L.; Belloso, E.; Caro, P.; Pujol-Borrell, R.: Cloning of ARE-containing genes by AU-motif-directed display. Genomics 54: 278-286, 1998.
[7644] 1745. Kostrub, C. F.; Knudsen, K.; Subramani, S.; Enoch, T.: Huslp, a conserved fission yeast checkpoint protein, interacts with Rad1p and is phosphorylated in response to DNA damage. EMBO J. 17: 2055-2066, 1998.
[7645] 1746. Katashima, R.; Iwahana, H.; Fujimura, M.; Yamaoka, T.; Ishizuka, T.; Tatibana, M.; Itakura, M.: Molecular cloning of a human cDNA for the 41-kDa phosphoribosylpyrophosphate synthetase-associated protein. Biochim. Biophys. Acta 1396: 245-250, 1998.
[7646] 1747. Katashima, R.; Iwahana, H.; Fujimura, M.; Yamaoka, T.; Itakura, M.: Assignment of the human phosphoribosylpyrophosphate synthetase-associated protein 41 gene (PRPSAP2) to 17p11.2-p12. Genomics 54: 180-181, 1998.
[7647] 1748. tom Dieck, S.; Sanmarti-Vila, L.; Langnaese, K.; Richter, K.; Kindler, S.; Soyke, A.; Wex, H.; Smalla, K.-H.; Kampf, U.; Franzer, J.-T.; Stumm, M.; Garner, C. C.; Gundelfinger, E. D.: Bassoon, a novel zinc-finger CAG/glutamine-repeat protein selectively localized at the active zone of presynaptic nerve terminals. J. Cell Biol. 142: 499-509, 1998.
[7648] 1749. Winter, c.; tom Dieck, S.; Boeckers, T. M.; Bockmann, J.; Kampf, U.; Sanmarti-Vila, L.; Langnaese, K.; Altrock, W.; Stumm, M.; Soyke, A.; Wieacker, P.; Garner, C. C.; Gundelfinger, E. D.: The presynaptic cytomatrix protein Bassoon: sequence and chromosomal localization of the human BSN gene. Genomics 57: 389-397, 1999.
[7649] 1750. Li, J.; Ding, S.-F.; Habib, N. A.; Fermor, B. F.; Wood, C. B.; Gilmour, R. S.: Partial characterization of a cDNA for human stearoyl-CoA desaturase and changes in its mRNA expression in some normal and malignant tissues. Int. J. Cancer 57: 348-352, 1994.
[7650] 1751. Ntambi, J. M.; Miyazaki, M.; Stoehr, J. P.; Lan, H.; Kendziorski, C. M.; Yandell, B. S.; Song, Y.; Cohen, P.; Friedman, J. M.; Attie, A. D.: Loss of stearoyl-CoA desaturase-1 function protects mice against adiposity. Proc. Nat. Acad. Sci. 99: 11482-11486, 2002.
[7651] 1752. Thiede, M. A.; Ozols, J.; Strittmatter, P.: Construction and sequence of cDNA for rat liver stearyl coenzyme A desaturase. J. Biol. Chem. 261:13230-13235, 1986.
[7652] 1753. Zhang, L.; Ge, L.; Parimoo, S.; Stenn, K.; Prouty, S. M.: Human stearoyl-CoA desaturase: alternative transcripts generated from as ingle gene by usage of tandem polyadenylation sites. Biochem. J. 340:255-264, 1999.
[7653] 1754. Zheng, Y.; Eilertsen, K. J.; Ge, L.; Zhang, L.; Sundberg, J. P.; Prouty, S. M.; Stenn, K. S.; Parimoo, S.: Scdl is expressed in sebaceous glands and is disrupted in the asebia mouse. (Letter) Nature Genet. 23:268-270, 1999.
[7654] 1755. Kahn, M. L.; Zheng, Y.-W.; Huang, W.; Bigornia, V.; Zeng, D.; Moff, S.; Farese, R. V., Jr.; Tam, C.; Coughlin, S. R.: A dual thrombin receptor system for platelet activation. Nature 394: 690-694, 1998.
[7655] 1756. Xu, W.-F.; Andersen, H.; Whitmore, T. E.; Presnell, S. R.; Yee, D. P.; Ching, A.; Gilbert, T.; Davie, E. W.; Foster, D. C.: Cloning and characterization of human protease-activated receptor 4. Proc. Nat. Acad. Sci. 95: 6642-6646, 1998.
[7656] 1757. Matikainen, T.; Perez, G. I.; Jurisicova, A.; Pru, J. K.; Schlezinger, J. J.; Ryu, H.-Y.; Laine, J.; Sakai, T.; Korsmeyer, S. J.; Casper, R. F.; Sherr, D. H.; Tilly, J. L.: Aromatic hydrocarbon receptor-driven Bax gene expression is required for premature ovarian failure caused by biohazardous environmental chemicals. Nature Genet. 28: 355-360, 2001.
[7657] 1758. Santamarina-Fojo, S.; Peterson, K.; Knapper, C.; Qiu, Y.; Freeman, L.; Cheng, J.-F.; Osorio, J.; Remaley, A.; Yang, X.-P.; Haudenschild, C.; Prades, C.; Chimini, G.; Blackmon, E.; Francois, T.; Duverger, N.; Rubin, E. M.; Rosier, M.; Denefle, P.; Fredrickson, D. S.; Brewer, H. B., Jr.: Complete genomic sequence of the human ABCA1 gene: analysis of the human and mouse ATP-binding cassette A promoter. Proc. Nat. Acad. Sci. 97: 7987-7992, 2000. Note: Erratum: Proc. Nat. Acad. Sci. 99: 1098 only, 2002.
[7658] 1759. Szakacs, G.; Langmann, T.; Ozvegy, C.; Orso, E.; Schmitz, G.; Varadi, A.; Sarkadi, B.: Characterization of the ATPase cycle ofhuman ABCA1: implications for its function as a regulator rather than an active transporter. Biochem. Biophys. Res. Commun. 288: 1258-1264, 2001.
[7659] 1760. Utech, M.; Hobbel, G.; Rust, S.; Reinecke, H.; Assmann, G.; Walter, M.: Accumulation of RhoA, RhoB, RhoG, and Rac1 in fibroblasts from Tangier disease subjects suggests a regulatory role of Rho family proteins in cholesterol efflux. Biochem. Biophys. Res. Commun. 280:229-236, 2001.
[7660] 1761. Zhao, L.-X.; Zhou, C.-J.; Tanaka, A.; Nakata, M.; Hirabayashi, T.; Amachi, T.; Shioda, S.; Ueda, K.; Inagaki, N.: Cloning, characterization and tissue distribution of the rat ATP-binding cassette (ABC) transporter ABC2/ABCA2. Biochem J. 350: 865-872, 2000.
[7661] 1762. Zwarts, K. Y.; Clee, S. M.; Zwinderman, A. H.; Engert, J. C.; Singaraja, R.; Loubser, O.; James, E.; Roomp, K.; Hudson, T. J.; Jukema, J. W.; Kastelein, J. J. P.; Hayden, M. R.: ABCA1 regulatory variants influence coronary artery disease independent of effects on plasma lipid levels. Clin. Genet. 61: 115-125, 2002.
[7662] 1763. Kozu, T.; Henrich, B.; Schafer, K. P.: Structure and expression of the gene (HNRPA2B1) encoding the human hnRNP protein A2/B1. Genomics 25:365-371, 1995.
[7663] 1764. Aruga, J.; Yokota, N.; Hashimoto, M.; Furuichi, T.; Fukuda, M.; Mikoshiba, K.: A novel zinc finger protein, Zic, is involved in neurogenesis, especially in the cell lineage of cerebellar granule cells. J. Neurochem. 63:1880-1890, 1994.
[7664] 1765. Salero, E.; Perez-Sen, R.; Aruga, J.; Gimenez, C.; Zafra, F.: Transcription factors Zic1 and Zic2 bind and transactivate the apolipoprotein E gene promoter. J. Biol. Chem. 276: 1881-1888, 2001.
[7665] 1766. Yokota, N.; Aruga, J.; Takai, S.; Yamada, K.; Hamazaki, M.; Iwase, T.; Sugimura, H.; Mikoshiba, K.: Predominant expression of human Zic in cerebellar granule cell lineage and medulloblastoma. Cancer Res. 56: 377-383, 1996.
[7666] 1767. Shimomura, H.; Sanke, T.; Hanabusa, T.; Tsunoda, K.; Furuta, H.; Nanjo, K.: Nonsense mutation of islet-1 gene (Q310X) found in a type 2 diabetic patient with a strong family history. Diabetes 49: 1597-1600, 2000.
[7667] 1768. Tanizawa, Y.; Riggs, A. C.; Dagogo-Jack, S.; Vaxillaire, M.; Froguel, P.; Liu, L.; Donis-Keller, H.; Permutt, M. A.: Isolation of the human LIM/homeodomain gene islet-1 and identification of a simple sequence repeat 1. Diabetes 43: 935-941, 1994.
[7668] 1769. Corti, O.; Finocchiaro, G.; Rossi, E.; Zuffardi, O.; DiDonato, S.: Molecular cloning of cDNAs encoding human carnitine acetyltransferase and mapping of the corresponding gene to chromosome 9q34.1. Genomics 23:94-99, 1994.
[7669] 1770. Kalaria, R. N.; Harik, S. I.: Carnitine acetyltransferase activity in the human brain and its microvessels is decreased in Alzheimer's disease. Ann. Neurol. 32: 583-586, 1992.
[7670] 1771. van der Leij, F. R.; Huijkman, N. C. A.; Boomsma, C.; Kuipers, J. R. G.; Bartelds, B.: Genomics of the human carnitine acyltransferase genes. Molec. Genet. Metab. 71: 139-153, 2000.
[7671] 1772. Ghosh, A.: Learning more about NMDA receptor regulation. Science 295:449-451, 2002.
[7672] 1773. Grunwald, I. C.; Korte, M.; Wolfer, D.; Wilkinson, G. A.; Unsicker, K.; Lipp, H.-P.; Bonhoeffer, T.; Klein, R.: Kinase-independent requirement of EphB2 receptors in hippocampal synaptic plasticity. Neuron 32:1027-1040, 2001.
[7673] 1774. Henderson, J. T.; Georgiou, J.; Jia, Z.; Robertson, J.; Elowe, S.; Roder, J. C.; Pawson, T.: The receptor tyrosine kinase EphB2 regulates NMDA-dependent synaptic function. Neuron 32: 1041-1056, 2001.
[7674] 1775. Himanen, J.-P.; Rajashankar, K. R.; Lackmann, M.; Cowan, C. A.; Henkemeyer, M.; Nikolov, D. B.: Crystal structure of an Eph receptor-ephrin complex. Nature 414: 933-938, 2001.
[7675] 1776. Takasu, M. A.; Dalva, M. B.; Zigmond, R. E.; Greenberg, M. E.: Modulation of NMDA receptor-dependent calcium influx and gene expression through EphB receptors. Science 295: 491-495, 2002.
[7676] 1777. Carlberg, C.; Hooft van Huijsduijnen, R.; Staple, J. K.; DeLamarter, J. F.; Becker-Andre, M.: RZRs, a new family of retinoid-related orphan receptors that function as both monomers and homodimers. Molec. Endocr. 8:757-770, 1994.
[7677] 1778. Ueda, H. R.; Chen, W.; Adachi, A.; Wakamatsu, H.; Hayashi, S.; Takasugi, T.; Nagano, M.; Nakahama, K.; Suzuki, Y.; Sugano, S.; Iino, M.; Shigeyoshi, Y.; Hashimoto, S.: A transcription factor response element for gene expression during circadian night. Nature 418:534-539, 2002.
[7678] 1779. Masternak, K.; Barras, E.; Zufferey, M.; Conrad, B.; Corthals, G.; Aebersold, R.; Sanchez, J.-C.; Hochstrasser, D. F.; Mach, B.; Reith, W.: A gene encoding a novel RFX-associated transactivator is mutated in the majority of MHC class II deficiency patients. Nature Genet. 20: 273-277, 1998.
[7679] 1780. Prange, C. K.; Pennacchio, L. A.; Lieuallen, K.; Fan, W.; Lennon, G. G.: Characterization of the human neurocan gene, CSPG3. Gene 221:199-205, 1998.
[7680] 1781. Rauch, U.; Grimpe, B.; Kulbe, G.; Arnold-Ammer, I.; Beier, D. R.; Fassler, R.: Structure and chromosomal localization of the mouseneurocan gene. Genomics 28: 405-410, 1995.
[7681] 1782. Rauch, U.; Karthikeyan, L.; Maurel, P.; Margolis, R. U.; Margolis, R. K.: Cloning and primary structure of neurocan, a developmentally regulated, aggregating chondroitin sulfate proteoglycan of brain. J. Biol. Chem. 267: 19536-19547, 1992.
[7682] 1783. Barnard, R. C.; Pascall, J. C.; Brown, K. D.; McKay, I. A.; Williams, N. S.; Bustin, S. A.: Coding sequence of ERF-1, the human homologue of Tis11b/cMG1, members of the Tis11 family of early response genes. Nucleic Acids Res. 21: 3580 only, 1993.
[7683] 1784. Bustin, S. A.; Xiao-Feng, N.; Barnard, R. C.; Kumar, V.; Pascall, J. C.; Brown, K. D.; Leigh, I. M.; Williams, N. S.; McKay, I. A.: Cloning and characterisation of ERF1, a human member of the Tis11 family of early-response genes. DNA Cell Biol. 13: 449-459, 1994.
[7684] 1785. Maclean, K. N.; See, C. G.; McKay, I. A.; Bustin, S. A.: The human immediate early gene BRF1 maps to chromosome 14q22-q24. Genomics 30:89-90, 1995.
[7685] 1786. Ning, Z.-Q.; Norton, J. D.; Li, J.; Murphy, J. J.: Distinct mechanisms for rescue from apoptosis in Ramos human B cells by signaling through CD40 and interleukin-4 receptor: a role for inhibition of an early response gene, Berg36. Europ. J. Immun. 26: 2356-2363, 1996.
[7686] 1787. Maas, S.; Kim, Y.-G.; Rich, A.: Genomic clustering of tRNA-specific adenosine deaminase ADAT1 and two tRNA synthetases. Mammalian Genome 12:387-393, 2001.
[7687] 1788. Dever, T. E.; Wei, C.-L.; Benkowski, L. A.; Browning, K.; Merrick, W. C.; Hershey, J. W. B.: Determination of the amino acid sequence of rabbit, human, and wheat germ protein synthesis factor elF-4C by cloning and chemical sequencing. J. Biol. Chem. 269: 3212-3218, 1994.
[7688] 1789. Adibi, S. A.: The oligopeptide transporter (Pept-1) in human intestine: biology and function. Gastroenterology 113: 332-340, 1997.
[7689] 1790. Fei, Y.-J.; Kanai, Y.; Nussberger, S.; Ganapathy, V.; Leibach, F. H.; Romero, M. F.; Singh, S. K.; Boron, W. F.; Hediger, M. A.: Expression cloning of a mammalian proton-coupled oligopeptide transporter. Nature 368:563-566, 1994.
[7690] 1791. Liang, R.; Fei, Y.-J.; Prasad, P. D.; Ramamoorthy, S.; Han, H.; Yang-Feng, T. L.; Hediger, M. A.; Ganapathy, V.; Leibach, F. H.: Human intestinal H(+)/peptide cotransporter: cloning, functional expression, and chromosomal localization. J. Biol. Chem. 270: 6456-6463, 1995.
[7691] 1792. Henkemeyer, M.; Orioli, D.; Henderson, J. T.; Saxton, T. M.; Roder, J.; Pawson, T.; Klein, R.: Nuk controls path finding of commissuralaxons in the mammalian central nervous system. Cell 86: 35-46, 1996.
[7692] 1793. Ikegaki, N.; Tang, X. X.; Liu, X.-G.; Biegel, J. A.; Allen, C.; Yoshioka, A.; Sulman, E. P.; Brodeur, G. M.; Pleasure, D. E.: Molecular characterization and chromosomal localization of DRT (EPHT3): a developmentally regulated human protein-tyrosine kinase gene of the EPH family. Hum. Molec. Genet. 4: 2033-2045, 1995.
[7693] 1794. Saito, T.; Seki, N.; Matsuda, Y.; Kitahara, M.; Murata, M.; Kanda, N.; Nomura, N.; Yamamoto, T.; Hori, T.: Identification of the human ERK gene as a putative receptor tyrosine kinase and its chromosomal localization to 1p36.1: a comparative mapping of human, mouse, and rat chromosomes. Genomics 26: 382-384, 1995.
[7694] 1795. Wybenga-Groot, L. E.; Baskin, B.; Ong, S. H.; Tong, J.; Pawson, T.; Sicheri, F.: Structural basis for autoinhibition of the EphB2 receptor tyrosine kinase by the unphosphorylated juxtamembrane region. Cell 106:745-757, 2001.
[7695] 1796. Reif, K.; Ekland, E. H.; Ohl, L.; Nakano, H.; Lipp, M.; Forster, R.; Cyster, J. G.: Balanced responsiveness to chemoattractants from adjacent zones determines B-cell position. Nature 416: 94-99, 2002.
[7696] 1797. Inoue, I.; Taniuchi, I.; Kitamura, D.; Jenkins, N. A.; Gilbert, D. J.; Copeland, N. G.; Watanabe, T.: Characteristics of the mouse genomic histamine H1 receptor gene. Genomics 36: 178-181, 1996.
[7697] 1798. Le Coniat, M.; Traiffort, E.; Ruat, M.; Arrang, J.-M.; Berger, R.: Chromosomal localization of the human histamine H1-receptor gene. Hum. Genet. 94: 186-188, 1994.
[7698] 1799. Ma, R. Z.; Gao, J.; Meeker, N. D.; Fillmore, P. D.; Tung, K. S. K.; Watanabe, T.; Zachary, J. F.; Offner, H.; Blankenhorn, E. P.; Teuscher, C.: Identification of Bphs, an autoimmune disease locus, as histamine receptor H-1. Science 297: 620-623, 2002.
[7699] 1800. Yamashita, M.; Fukui, H.; Sugama, K.; Horio, Y.; Ito, S.; Mizuguchi, H.; Wada, H.: Expression cloning of a cDNA encoding the bovine histamine H1 receptor. Proc. Nat. Acad. Sci. 88: 11515-11519, 1991.
[7700] 1801. Bauer, S.; Groh, V.; Wu, J.; Steinle, A.; Phillips, J. H.; Lanier, L. L.; Spies, T.: Activation of NK cells and T cells by NKG2D, a receptor for stress-inducible MICA. Science 285: 727-729, 1999.
[7701] 1802. Diefenbach, A.; Jensen, E. R.; Jamieson, A. M.; Raulet, D. H.: Rael and H60 ligands of the NKG2D receptor stimulate tumour immunity. Nature 413:165-171, 2001.
[7702] 1803. Girardi, M.; Oppenheim, D. E.; Steele, C. R.; Lewis, J. M.; Glusac, E.; Filler, R.; Hobby, P.; Sutton, B.; Tigelaar, R. E.; Hayday, A. C.: Regulation of cutaneous malignancy by gamma-delta T cells. Science 294:605-609, 2001.
[7703] 1804. Groh, V.; Rhinehart, R.; Randolph-Habecker, J.; Topp, M. S.; Riddell, S. R.; Spies, T.: Costimulation of CD8-alpha-beta T cells by NKG2Dvia engagement by MIC induced on virus-infected cells. Nature Immun. 2:255-260, 2001.
[7704] 1805. Groh, V.; Wu, J.; Yee, C.; Spies, T.: Tumour-derived soluble MIC ligands impair expression of NKG2D and Tcell activation. Nature 419:734-738, 2002.
[7705] 1806. Li, P.; Morris, D. L.; Willcox, B. E.; Steinle, A.; Spies, T.; Strong, R. K.: Complex structure of the activating immunoreceptor NKG2D and its MHC class I-like ligand MICA. Nature Immun. 2: 443-451, 2001.
[7706] 1807. Jacquemin, P.; Durviaux, S. M.; Jensen, J.; Godfraind, C.; Gradwohl, G.; Guillemot, F.; Madsen, O. D.; Carmeliet, P.; Dewerchin, M.; Collen, D.; Rousseau, G. G.; Lemaigre, F. P.: Transcription factor hepatocyte nuclear factor 6 regulates pancreatic endocrine cell differentiation and controls expression of the proendocrine gene ngn3. Molec. Cell. Biol. 20: 4445-4454, 2000.
[7707] 1808. Jacquemin, P.; Lannoy, V. J.; Rousseau, G. G.; Lemaigre, F. P.: OC-2, a novel mammalian member of the ONECUT class of homeodomain transcription factors whose function in liver partially overlaps with that of hepatocyte nuclear factor-6. J. Biol. Chem. 274: 2665-2671, 1999.
[7708] 1809. Lemaigre, F. P.; Durviaux, S. M.; Truong, O.; Lannoy, V. J.; Hsuan, J. J.; Rousseau, G. G.: Hepatocyte nuclear factor 6, a transcription factor that contains a novel type of homeodomain and a single cut domain. Proc. Nat. Acad. Sci. 93: 9460-9464, 1996.
[7709] 1810. Pierreux, C. E.; Stafford, J.; Demonte, D.; Scott, D. K.; Vandenhaute, J.; O'Brien, R. M.; Granner, D. K.; Rousseau, G. G.; Lemaigre, F. P.: Antiglucocorticoid activity of hepatocyte nuclear factor-6. Proc. Nat. Acad. Sci. 96: 8961-8966, 1999.
[7710] 1811. Samadani, U.; Costa, R. H.: The transcriptional activator hepatocyte nuclear factor 6 regulates liver gene expression. Molec. Cell. Biol. 16:6273-6284, 1996.
[7711] 1812. Vaisse, C.; Kim, J.; Espinosa, R., III; Le Beau, M. M.; Stoffel, M.: Pancreatic islet expression studies and polymorphic DNA markers in the genes encoding hepatocyte nuclear factor-3-alpha, -3-beta,-4-gamma, and -6. Diabetes 46: 1364-1367, 1997.
[7712] 1813. Yamada, K.; Nishida, K.; Hibi, M.; Hirano, T.; Matsuda, Y.: Comparative FISH mapping of Gab1 and Gab2 genes in human, mouse and rat. Cytogenet. Cell Genet. 94: 39-42, 2001.
[7713] 1814. Kobayashi, H.; Hino, M.; Shimodahira, M.; Iwakura, T.; Ishihara, T.; Ikekubo, K.; Ogawa, Y.; Nakao, K.; Kurahachi, H.: Missense mutation of TRPS1 in a family of tricho-rhino-phalangeal syndrome type III. Am. J. Med. Genet. 107: 26-29, 2002.
[7714] 1815. Abuladze, N.; Lee, I.; Newman, D.; Hwang, J.; Boorer, K.; Pushkin, A.; Kurtz, I.: Molecular cloning, chromosomal localization, tissue distribution, and functional expression of the human pancreatic sodium bicarbonate cotransporter. J. Biol. Chem. 273: 17689-17695, 1998.
[7715] 1816. Burnham, C. E.; Amlal, H.; Wang, Z.; Shull, G. E.; Soleimani, M.: Cloning and functional expression of a human kidney Na+:HCO3− cotransporter. J. Biol. Chem. 272: 19111-19114, 1997.
[7716] 1817. Choi, I.; Romero, M. F.; Khandoudi, N.; Bril, A.; Boron, W. F.: Cloning and characterization of a human electrogenic Na(+)-HCO(3−)cotransporter isoform (hhNBC). Am. J. Physiol. 276: C576-C584, 1999.
[7717] 1818. Igarashi, T.; Inatomi, J.; Sekine, T.; Cha, S. H.; Kanai, Y.; Kunimi, M.; Tsukamoto, K.; Satoh, H.; Shimadzu, M.; Tozawa, F.; Mori, T.; Shiobara, M.; Seki, G.; Endou, H.: Mutations in SLC4A4 cause permanent isolated proximal renal tubular acidosis with ocular abnormalities. (Letter) Nature Genet. 23: 264-265, 1999.
[7718] 1819. Romero, M. F.; Boron, W. F.: Electrogenic Na(+)/HCO(3−) cotransporters: cloning and physiology. Annu. Rev. Physiol. 61: 699-723, 1999.
[7719] 1820. Soleimani, M.; Burnham, C. E.: Physiologic and molecular aspects of the Na(+):HCO(3-) cotransporter in health and disease processes. Kidney Int. 57: 371-384, 2000.
[7720] 1821. Usui, T.; et al.; et al.: Pflugers Arch. 438: 458-462, 1999.
[7721] 1822. Wiley, S. R.; Cassiano, L.; Lofton, T.; Davis-Smith, T.; Winkles, J. A.; Lindner, V.; Liu, H.; Daniel, T. O.; Smith, C. A.; Fanslow, W. C.: A novel TNF receptor family member binds TWEAK and is implicated in angiogenesis. Immunity 15: 837-846, 2001.
[7722] 1823. Stec, I.; Wright, T. J.; van Ommen, G.-J. B.; de Boer, P. A. J.; van Haeringen, A.; Moorman, A. F. M.; Altherr, M. R.; den Dunnen, J. T.: WHSC1, a 90 kb SET domain-containing gene, expressed in early development and homologous to a Drosophila dysmorphy gene maps in the Wolf-Hirschhorn syndrome critical region and is fused to IgH int(4;14) multiple myeloma. Hum. Molec. Genet. 7: 1071-1082, 1998.
[7723] 1824. Mao, B.; Wu, W.; Li, Y.; Hoppe, D.; Stannek, P.; Glinka, A.; Niehrs, C.: LDL-receptor-related protein 6 is a receptor for Dickkopf proteins. Nature 411:321-325, 2001.
[7724] 1825. Hsu, D. R.; Economides, A. N.; Wang, X,; Eimon, P. M.; Harland, R. M.: The Xenopus dorsalizing factor gremlin identifies a novel family of secreted proteins that antagonize BMP activities. Molec. Cell 1: 673-683, 1998.
[7725] 1826. Topol, L. Z.; Modi, W. S.; Koochekpour, S.; Blair, D. G.: DRM-Gremlin (CKTSF1B1) maps to human chromosome 15 and is highly expressed in adult and fetal brain. Cytogenet. Cell Genet. 89: 79-84, 2000.
[7726] 1827. Poy, F.; Yaffe, M. B.; Sayos, J.; Saxena, K.; Morra, M.; Sumegi, J.; Cantley, L. C.; Terhorst, C.; Eck, M. J.: Crystal structures of the XLP protein SAP reveal a class of SH2 domains with extended, phosphotyrosine-independent sequence recognition. Molec. Cell 4:555-561, 1999.
[7727] 1828. Provisor, A. J.; Iacuone, J. J.; Chilcote, R. R.; Neiburger, R. G.; Crussi, F. G.; Baehner, R. L.: Acquired agammaglobulinemia after a life-threatening illness with clinical and laboratory features of infectious mononucleosis in three related male children. New Eng. J. Med. 293: 62-65, 1975.
[7728] 1829. Purtilo, D. T.: Pathogenesis and phenotypes of an X-linked recessivelymphoproliferative syndrome. Lancet II: 882-885, 1976.
[7729] 1830. Purtilo, D. T.: X-linked lymphoproliferative syndrome: an immunodeficiency disorder with acquired agammaglobulinemia, fatal infectious mononucleosis, or malignant lymphoma. Arch. Path. Lab. Med. 105: 119-121, 1981.
[7730] 1831. Purtilo, D. T.; Bhawan, J.; Hutt, L. M.; De Nicola, L.; Szymanski, I.; Yang, J. P. S.; Boto, W.; Naier, R.; Thorley-Lawson, D.: Epstein-Barr virus in the X-linked recessive lymphoproliferative syndrome. Lancet I:798-801, 1978.
[7731] 1832. Purtilo, D. T.; Cassel, C. K.; Yang, J. P. S.: Fatal infectious mononucleosis in familial lymphohistiocytosis. (Letter) New Eng. J. Med. 201: 736 only, 1974.
[7732] 1833. Purtilo, D. T.; Cassel, C. K.; Yang, J. P. S.; Harper, R.; Stephenson, S. R.; Landing, B. H.; Vewter, G. F.: X-linked recessive progressive combined variable immunodeficiency (Duncan's disease). Lancet I:935-941, 1975.
[7733] 1834. Purtilo, D. T.; DeFlorio, D., Jr.; Hutt, L. M.; Bhawan, J.; Yang, J. P. S.; Otto, R. L.; Edwards, W.: Variable phenotypic expression of an X-linked recessive lymphoproliferative syndrome. New Eng. J. Med. 297: 1077-1081, 1977.
[7734] 1835. Purtilo, D. T.; Grierson, H. L.: Methods of detection of new families with X-linked lymphoproliferative disease. Cancer Genet. Cytogenet. 51: 143-153, 1991.
[7735] 1836. Purtilo, D. T.; Sakamoto, K.; Barnabei, V.; Seeley, J.; Bechtold, T.; Rogers, G.; Yetz, J.; Harada, S.; the XLP collaborators: Epstein-Barr virus-induced diseases in boys with the X-linked lymphoproliferative syndrome (XLP): update on studies of the registry. Am. J. Med. 73:49-56, 1982.
[7736] 1837. Purtilo, D. T.; Yang, J. P. S.; Allegra, S.; DeFlorio, D.; Hutt, L. M.; Soltani, M.; Vawter, G. F.: Hematopathology and pathogenesis of the X-linked recessive lymphoproliferative syndrome. Am. J. Med. 62:225-233, 1977.
[7737] 1838. Sanger, W. G.; Grierson, H. L.; Skare, J.; Wyandt, H.; Pirruccello, S.; Fordyce, R.; Purtilo, D. T.: Partial Xq25 deletion in a family with the X-linked lymphoproliferative disease (XLP). Cancer Genet. Cytogenet. 47: 163-169, 1990.
[7738] 1839. Sayos, J.; Wu, C.; Morra, M.; Wang, N.; Zhang, X.; Allen, D.; van Schaik, S.; Notarangelo, L.; Gehat, R.; Roncarolo, M. G.; Oettgen, H.; De Vries, J. E.; Aversall, G.; Terhorst, C.: The X-linked lymphoproliferative-disease gene product SAP regulates signals induced through the coreceptor SLAM. Nature 395: 462-469, 1998.
[7739] 1840. Scher, I.: The CBA/N mouse strain: an experimental model illustrating the influence of the X-chromosome on immunity. Adv. Immun. 33: 1-71, 1982.
[7740] 1841. Schuster, V.; Kreth, H. W.: X-linked lymphoproliferative disease. In: Ochs, H. D.; Smith, C. I. E.; Puck, J. M. (eds.): Primary Immunodeficiency Diseases: A Molecular and Genetic Approach. New York: Oxford University Press 1999. Pp. 222-232.
[7741] 1842. Seemayer, T. A.; Gross, T. G.; Egeler, R. M.; Pirruccello, S. J.; Davis, D. J.; Kelly, C. M.; Okano, M.; Lanyi, A.; Sumegi, J.: X-linked lymphoproliferative disease: twenty-five years after the discovery. Pediat. Res. 38: 471-478, 1995.
[7742] 1843. Skare, J.; Grierson, H.; Wyandt, H.; Sanger, W.; Milunsky, J.; Purtilo, D.; Sullivan, J.; Milunsky, A.: Genetics of the X-linked lymphoproliferative syndrome. (Abstract) Am. J. Hum. Genet. 45 (suppl.):A161 only, 1989.
[7743] 1844. Skare, J.; Madan, S.; Glaser, J.; Purtilo, D.; Nitowsky, H.; Pulijaal, V.; Milunsky, A.: First prenatal diagnosis of Xlinked lymphoproliferative disease. Am. J. Med. Genet. 44: 79-81, 1992.
[7744] 1845. Skare, J.; Milunsky, A.; Byron, K.; Sullivan, J.: The mutation causing X-linked lymphoproliferative syndrome lies in Xq26. (Abstract) Am. J. Hum. Genet. 41: A185 only, 1987.
[7745] 1846. Skare, J.; Wu, B.-L.; Madan, S.; Pulijaal, V.; Purtilo, D.; Haber, D.; Nelson, D.; Sylla, B.; Grierson, H.; Nitowsky, H.; Glaser, J.; Wissink, J.; White, B.; Holden, J.; Housman, D.; Lenoir, G.; Wyandt, H.; Milunsky, A.: Characterization of three overlapping deletions causing X-linked lymphoproliferative disease. Genomics 16: 254-255, 1993.
[7746] 1847. Skare, J. C.; Grierson, H. L.; Sullivan, J. L.; Nussbaum, R. L.; Purtilo, D. T.; Sylla, B. S.; Lenoir, G. M.; Reilly, D. S.; White, B. N.; Milunsky, A.: Linkage analysis of seven kindreds with the X-linked lymphoproliferative syndrome (XLP) confirms that the XLPlocus is near DXS42 and DXS37. Hum. Genet. 82: 354-358, 1989.
[7747] 1848. Skare, J. C.; Milunsky, A.; Byron, K. S.; Sullivan, J. L.: Mapping the X-linked lymphoproliferative syndrome. Proc. Nat. Acad. Sci. 84:2015-2018, 1987.
[7748] 1849. Skare, J. C.; Sullivan, J. L.; Milunsky, A.: Mapping the mutation causing the X-linked lymphoproliferative syndrome in relation to restriction fragment length polymorphisms on Xq. Hum. Genet. 82: 349-353, 1989.
[7749] 1850. Steinherz, R.; Levy, Y.; Litwin, A.; Nitzan, M.; Friedman, E.; Levin, S.: X-linked lymphoproliferative syndrome: a new kindred with variable phenotypic expression. Am. J. Dis. Child. 139: 191-193, 1985.
[7750] 1851. Maho, A.; Bensimon, A.; Vassart, G.; Parmentier, M.: Mapping of the CCXCR1, CX3CR1, CCBP2 and CCR9 genes to the CCR cluster within the 3p21.3 region of the human genome. Cytogenet. Cell Genet. 87:265-268, 1999.
[7751] 1852. Roberts, A. I.; Lee, L.; Schwarz, E.; Groh, V.; Spies, T.; Ebert, E. C.; Jabri, B.: Cutting edge: NKG2D receptors induced by IL-15 costimulate CD28-negative effector CTL in the tissue microenvironment. J. Immun. 167: 5527-5530, 2001.
[7752] 1853. Ware, R. E.; Howard, T. A.; Kamitani, T.; Chang, H.-M.; Yeh, E. T. H.; Seldin, M. F.: Chromosomal assignment of genes involved in glycosylphosphatidylinositol anchor biosynthesis: implications for the pathogenesis of paroxysmal nocturnal hemoglobinuria. Blood 83:3753-3757, 1994.
[7753] 1854. Watanabe, R.; Inoue, N.; Westfall, B.; Taron, C. H.; Orlean, P.; Takeda, J.; Kinoshita, T.: The first step of glycosylphosphatidylinositol biosynthesis is mediated by a complex of PIG-A, PIG-H, PIG-C and GPI1. EMBO J. 17: 877-885, 1998.
[7754] 1855. Watanabe, R.; Kinoshita, T.; Masaki, R.; Yamamoto, A.; Takeda, J.; Inoue, N.: PIG-A and PIG-H, which participate in glycosylphosphatidylinositol anchor biosynthesis, form a protein complex in the endoplasmic reticulum. J. Biol. Chem. 271: 26868-26875, 1996.
[7755] 1856. Bishop, K. M.; Goudreau, G.; O'Leary, D. D. M.: Regulation of area identity in the mammalian neocortex by Em×2 and Pax6. Science 288:344-349, 2000.
[7756] 1857. Janz, R.; Sudhof, T. C.; Hammer, R. E.; Unni, V.; Siegelbaum, S. A.; Bolshakov, V. Y.: Essential roles in synaptic plasticity for synaptogyrin I and synaptophysin I. Neuron 24: 687-700, 1999.
[7757] 1858. McMahon, H. T.; Bolshakov, V. Y.; Janz, R.; Hammer, R. E.; Siegelbaum, S. A.; Sudhof, T. C.: Synaptophysin, a major synaptic vesicle protein, is not essential for neurotransmitter release. Proc. Nat. Acad. Sci. 93:4760-4764, 1996.
[7758] 1859. Geppert, M.; Khvotchev, M.; Krasnoperov, V.; Goda, Y.; Missler, M.; Hammer, R. E.; Ichtchenko, K.; Petrenko, A. G.; Sudhof, T. C.: Neurexin I-alpha is a major alpha-I atrotoxin receptor that cooperatesin alpha-I atrotoxin action. J. Biol. Chem. 273: 1705-1710, 1998.
[7759] 1860. Ichtchenko, K.; Hata, Y.; Nguyen, T.; Ullrich, B.; Missler, M.; Moomaw, C.; Sudhof, T. C.: Neuroligin 1: a splice site-specific ligand for beta-neurexins. Cell 81: 435-443, 1995.
[7760] 1861. Kleiderlein, J. J.; Nisson, P. E.; Jessee, J.; Li, W.-B.; Becker, K. G.; Derby, M. L.; Ross, C. A.; Margolis, R. L.: CCG repeats in cDNAs from human brain. Hum. Genet. 103: 666-673, 1998. Note: Erratum: Hum. Genet. 104: 113 only, 1999.
[7761] 1862. Margolis, R.: Personal Communication. Baltimore, Md. Mar. 29, 2000.
[7762] 1863. Missler, M.; Sudhof, T. C.: Neurexins: three genes and 1001 products. Trends Genet. 14: 20-26, 1998.
[7763] 1864. Ikeshima, H.; Imai, S.; Shimoda, K.; Hata, J.; Takano, T.: Expression of a MADS box gene, MEF2D, in neurons of the mouse central nervous system: implication of its binary function in myogenic and neurogenic cell lineages. Neurosci. Lett. 200: 117-120, 1995.
[7764] 1865. Shearman, L. P.; Zylka, M. J.; Weaver, D. R.; Kolakowski, L. F. Jr.; Reppert, S. M.: Two period homologs: circadian expression and photic regulation in the suprachiasmatic nuclei. Neuron 19: 1261-1269, 1997.
[7765] 1866. Toh, K. L.; Jones, C. R.; He, Y.; Eide, E. J.; Hinz, W. A.; Virshup, D. M.; Ptacek, L. J.; Fu, Y.-H.: An hPer2 phosphorylation site mutation in familial advanced sleep phase syndrome. Science 291: 1040-1043, 2001.
[7766] 1867. Chien, W.; Pei, L.: A novel binding factor facilitates nuclear translocation and transcriptional activation function of the pituitary tumor-transforming gene product. J. Biol. Chem. 275: 19422-19427, 2000.
[7767] 1868. Yaspo, M.-L.; Aaltonen, J.; Horelli-Kuitunen, N.; Peltonen, L.; Lehrach, H.: Cloning of a novel human putative type la integral membrane protein mapping to 21q22.3. Genomics 49: 133-136, 1998.
[7768] 1869. Yaspo, M.-L.; Gellen, L.; Mott, R.; Korn, B.; Nizetic, D.; Poustka, A. M.; Lehrach, H.: Model for a transcript map of human chromosome 21: isolation of new coding sequences from exon and enriched cDNA libraries. Hum. Molec. Genet. 4: 1291-1304, 1995.
[7769] 1870. Liao, C.; Wang, X. Y.; Wei, H. Q.; Li, S. Q.; Merghoub, T.; Pandolfi, P. P.; Wolgemuth, D. J.: Altered myelopoiesis and the development of acute myeloid leukemia in transgenic mice overexpressing cyclin A1. Proc. Nat. Acad. Sci. 98: 6853-6858, 2001.
[7770] 1871. Liu, D.; Matzuk, M. M.; Sung, W. K.; Guo, Q.; Wang, P.; Wolgemuth, D. J.: Cyclin A1 is required for meiosis in the male mouse. Nature Genet. 20: 377-380, 1998.
[7771] 1872. Muller, C.; Yang, R.; Beck-von-Peccoz, L.; Idos, G.; Verbeek, W.; Koeffler, H. P.: Cloning of the cyclin A1 genomic structure and characterization of the promoter region: GC boxes are essential for cell cycle-regulated transcription of the cyclin A1 gene. J. Biol. Chem. 274: 11220-11228, 1999.
[7772] 1873. Dolganov, G. M.; Maser, R. S.; Novikov, A.; Tosto, L.; Chong, S.; Bressan, D. A.; Petrini, J. H. J.: Human Rad50 is physically associated with human Mre11: identification of a conserved multiprotein complex implicated in recombinational DNA repair. Molec. Cell Biol. 16:4832-4841, 1996.
[7773] 1874. Hopfner, K.-P.; Craig, L.; Moncalian, G.; Zinkel, R. A.; Usui, T.; Owen, B. A. L.; Karcher, A.; Henderson, B.; Bodmer, J.-L.; McMurray, C. T.; Carney, J. P.; Petrini, J. H. J.; Tainer, J. A.: The Rad50 zinc-hook is a structure joining Mre11 complexes in DNA recombination and repair. Nature 418: 562-566, 2002.
[7774] 1875. Luo, G.; Yao, M. S.; Bender, C. F.; Mills, M.; Bladl, A. R.; Bradley, A.; Petrini, J. H. J.: Disruption of mRad50 causes embryonic stem cell lethality, abnormal embryonic development, and sensitivity to ionizing radiation. Proc. Nat. Acad. Sci. 96: 7376-7381, 1999.
[7775] 1876. Trujillo, K. M.; Yuan, S.-S. F.; Lee, E. Y.-H. P.; Sung, P.: Nuclease activities in a complex of human recombination and DNA repair factors Rad50, Mre11, and p95. J. Biol. Chem. 273: 21447-21450, 1998.
[7776] 1877. Deiss, L. P.; Feinstein, E.; Berissi, H.; Cohen, O.; Kimchi, A.: Identification of a novel serine/threonine kinase and a novel 15-kD protein as potential mediators of the gamma interferon-induced cell death. Genes Dev. 9: 15-30, 1995.
[7777] 1878. Feinstein, E.; Druck, T.; Kastury, K.; Berissi, H.; Goodart, S. A.; Overhauser, J.; Kimchi, A.; Huebner, K.: Assignment of DAP1 and DAPK: genes that positively mediate programmed cell death triggered by IFN-gamma—to chromosome regions 5p12.2 (sic) and 9q34.1, respectively. Genomics 29:305-307, 1995.
[7778] 1879. Kim, D.-H.; Iijima, H.; Goto, K.; Sakai, J.; Ishii, H.; Kim, H.-J.; Suzuki, H.; Kondo, H.; Saeki, S.; Yamamoto, T.: Human apolipoprotein E receptor 2: a novel lipoprotein receptor of the low density lipoprotein receptor family predominantly expressed in brain. J. Biol. Chem. 271:8373-8380, 1996.
[7779] 1880. Kim, D.-H.; Magoori, K.; Inoue, T. R.; Mao, C. C.; Kim, H.-J.; Suzuki, H.; Fujita, T.; Endo, Y.; Saeki, S.; Yamamoto, T. T.: Exon/intron organization, chromosome localization, alternative splicing, and transcription units of the human apolipoprotein E receptor 2 gene. J. Biol. Chem. 272:8498-8504, 1997.
[7780] 1881. Campuzano, V.; Montermini, L.; Molto, M. D.; Pianese, L.; Cossee, M.; Cavalcanti, F.; Monros, E.; Rodius, F.; Duclos, F.; Monticelli, A.; Zara, F.; Canizares, J.; Koutnikova, H.; Bidichandani, S. I.; Gellera, C.; Brice, A.; Trouillas, P.; De Michele, G.; Filla, A.; De Frutos, R.; Palau, F.; Patel, P. I.; Di Donato, S.; Mandel, J.-L.; Cocozza, S.; Koenig, M.; Pandolfo, M.: Friedreich's ataxia: autosomal recessive disease caused by an intronic GAA triplet repeat expansion. Science 271: 1423-1427, 1996.
[7781] 1882. Ilyin, G. P.; Rialland, M.; Pigeon, C.; Guguen-Guillouzo, C.: cDNA cloning and expression analysis of new members of the mammalian F-box protein family. Genomics 67: 40-47, 2000.
[7782] 1883. Andersson, P.; McGuire, J.; Rubio, C.; Gradin, K.; Whitelaw, M. L.; Pettersson, S.; Hanberg, A.; Poellinger, L.: A constitutively active dioxin/aryl hydrocarbon receptor induces stomach tumors. Proc. Nat. Acad. Sci. 99: 9990-9995, 2002.
[7783] 1884. Ema, M.; Matsushita, N.; Sogawa, K.; Ariyama, T.; Inazawa, J.; Nemoto, T.; Ota, M.; Oshimura, M.; Fujii-Kuriyama, Y.: Human arylhydrocarbon receptor: functional expression and chromosomal assignment to 7p21. J. Biochem. 116: 845-851, 1994.
[7784] 1885. Le Beau, M. M.; Carver, L. A.; Espinosa, R., III; Schmidt, J. V.; Bradfield, C. A.: Chromosomal localization of the human AHR locusen coding the structural gene for the Ah receptor to 7p21-p15. Cytogenet. Cell Genet. 66: 172-176, 1994.
[7785] 1886. Micka, J.; Milatovich, A.; Menon, A.; Grabowski, G. A.; Puga, A.; Nebert, D. W.: Human Ah receptor (AHR) gene: localization to 7p15 and suggestive correlation of polymorphism with CYP1A1 inducibility. Pharmacogenetics 7:95-101, 1997.
[7786] 1887. Shimizu, Y.; Nakatsuru, Y.; Ichinose, M.; Takahashi, Y.; Kume, H.; Mimura, J.; Fujii-Kuriyama, Y.; Ishikawa, T.: Benzo[a]pyrenecarcinogenicity is lost in mice lacking the aryl hydrocarbon receptor. Proc. Nat. Acad. Sci. 97: 779-782, 2000.
[7787] 1888. Breitbart, R. E.; Liang, C.; Smoot, L. B.; Laheru, D. A.; Mahdavi, V.; Nadal-Ginard, B.: A fourth human MEF2 transcription factor, hMEF2D, is an early marker of the myogenic lineage. Development 118: 1095-1106, 1993.
[7788] 1889. Hobson, G. M.; Krahe, R.; Garcia, E.; Siciliano, M. J.; Funanage, V. L.: Regional chromosomal assignments for four members of the MADS domain transcription enhancer factor 2 (MEF2) gene family to human chromosomes 15q26, 19p12, 5q14, and 1q12-q23. Genomics 29: 704-711, 1995.
[7789] 1890. Mao, Z.; Bonni, A.; Xia, F.; Nadal-Vicans, M.; Greenberg, M. E.: Neuronal activity-dependent cell survival mediated by transcription factor MEF2. Science 286: 785-790, 1999.
[7790] 1891. Martin, J. F.; Miano, J. M.; Hustad, C. M.; Copeland, N. G.; Jenkins, N. A.; Olson, E. N.: A Mef2 gene that generates a muscle-specific isoform via alternative mRNA splicing. Molec. Cell. Biol. 14: 1647-1656, 1994.
[7791] 1892. Molkentin, J. D.; Black, B. L.; Martin, J. F.; Olson, E. N.: Cooperative activation of muscle gene expression by MEF2 and myogenic bHLH proteins. Cell 83:1125-1136, 1995.
[7792] 1893. Naya, F. J.; Black, B. L.; Wu, H.; Bassel-Duby, R.; Richardson, J. A.; Hill, J. A.; Olson, E. N.: Mitochondrial deficiency and cardiac sudden death in mice lacking the MEF2A transcription factor. Nature Med. 15 October, 2002. Note: Advance Electronic Publication.
[7793] 1894. Pollock, R.; Treisman, R.: Human SRF-related proteins: DNA-binding properties and potential regulatory targets. Genes Dev. 5: 2327-2341, 1991.
[7794] 1895. Suzuki, E.; Lowry, J.; Sonoda, G.; Testa, J. R.; Walsh, K.: Structures and chromosome locations of the human MEF2A gene and a pseudo gene MEF2AP. Cytogenet. Cell Genet. 73: 244-249, 1996.
[7795] 1896. Yu, Y.-T.; Breitbart, R. E.; Smoot, L. B.; Lee, Y.; Mahdavi, V.; Nadal-Ginard, B.: Human myocyte-specific enhancer factor 2 comprises a group of tissue-restricted MADS box transcription factors. Genes Dev. 6: 1783-1798, 1992.
[7796] 1897. Krainc, D.; Haas, M.; Ward, D. C.; Lipton, S. A.; Bruns, G.; Leifer, D.: Assignment of human myocyte-specific enhancer binding factor 2C (hMEF2C) to human chromosome 5q14 and evidence that MEF2C is evolutionarily-conserved. Genomics 29: 809-811, 1995.
[7797] 1898. Leifer, D.; Krainc, D.; Yu, Y.-T.; McDermott, J.; Breitbart, R. E.; Heng, J.; Neve, R. L.; Kosofsky, B.; Nadal-Ginard, B.; Lipton, S. A.: MEF2C, a MADS/MEF2-family transcription factor expressed in a laminar distribution in cerebral cortex. Proc. Nat. Acad. Sci. 90:1546-1550, 1993.
[7798] 1899. Boie, Y.; Rushmore, T. H.; Darmon-Goodwin, A.; Grygorczyk, R.; Slipetz, D. M.; Metters, K. M.; Abramovitz, M.: Cloning and expression of a cDNA for the human prostanoid IP receptor. J. Biol. Chem. 269:12173-12178, 1994.
[7799] 1900. Ishikawa, T.; Tamai, Y.; Rochelle, J. M.; Hirata, M.; Namba, T.; Sugimoto, Y.; Ichikawa, A.; Narumiya, S.; Taketo, M. M.; Seldin, M. F.: Mapping of the genes encoding mouse prostaglandin D, E, and F and prostacyclin receptors. Genomics 32: 285-288, 1996.
[7800] 1901. Murata, T.; Ushikubi, F.; Matsuoka, T.; Hirata, M.; Yamasaki, A.; Sugimoto, Y.; Ichikawa, A.; Aze, Y.; Tanaka, T.; Yoshida, N.; Ueno, A.; Oh-ishi, S.; Narumiya, S.: Altered pain perception and inflammatory response in mice lacking prostacyclin receptor. Nature 388: 678-682, 1997.
[7801] 1902. Ogawa, Y.; Tanaka, I.; Inoue, M.; Yoshitake, Y.; Isse, N.; Nakagawa, O.; Usui, T.; Itoh, H.; Yoshimasa, T.; Narumiya, S.; Nakao, K.: Structural organization and chromosomal assignment of the human prostacyclin receptor gene. Genomics 27: 142-148, 1995.
[7802] 1903. Hoffman, I.; Balling, R.: Chromosomal localization of the murinec adherin-11. Mammalian Genome 6: 304 only, 1995.
[7803] 1904. Okazaki, M.; Takeshita, S.; Kawai, S.; Kikuno, R.; Tsujimura, A.; Kudo, A.; Amann, E.: Molecular cloning and characterization of OB-cadherin, a new member of cadherin family expressed in osteoblasts. J. Biol. Chem. 269: 12092-12098, 1994.
[7804] 1905. Tanihara, H.; Sano, K.; Heimark, R. L.; St. John, T.; Suzuki, S.: Cloning of five human cadherins clarifies characteristic features of cadherin extracellular domain and provides further evidence for two structurally different types of cadherin. Cell Adhes. Commun. 2:15-26, 1994.
[7805] 1906. Flanagan, J. R.; Becker, K. G.; Ennist, D. L.; Gleason, S. L.; Driggers, P. H.; Levi, B.-Z.; Appella, E.; Ozato, K.: Cloning of a negative transcription factor that binds to the upstream conserved region of Moloney murine leukemia virus. Molec. Cell. Biol. 12:38-44, 1992.
[7806] 1907. Hariharan, N.; Kelley, D. E.; Perry, R. P.: Delta, a transcription factor that binds to downstream elements in several polymerase II promoters, is a functionally versatile zinc finger protein. Proc. Nat. Acad. Sci. 88: 9799-9803, 1991.
[7807] 1908. Oei, S. L.; Shi, Y.: Transcription factor Yin Yang 1 stimulates poly(ADP-ribosyl)ation and DNA repair. Biochem. Biophys. Res. Commun. 284:450-454, 2001.
[7808] 1909. Park, K.; Atchison, M. L.: Isolation of a candidate repressor/activator, NF-E1 (YY-1, delta), that binds to the immunoglobulin kappa 3-prime enhancer and the immunoglobulin heavy-chain micro-El site. Proc. Nat. Acad. Sci. 88: 9804-9808, 1991.
[7809] 1910. Shi, Y.; Seto, E.; Chang, L.-S.; Shenk, T.: Transcriptional repression by YY1, a human GLI-Kruppel-related protein, and relief of repression by adenovirus E1A protein. Cell 67: 377-388, 1991.
[7810] 1911. Yao, Y.-L.; Dupont, B. R.; Ghosh, S.; Fang, Y.; Leach, R. J.; Seto, E.: Cloning, chromosomal localization and promoter analysis of the human transcription factor YY1. Nucleic Acids Res. 26: 3776-3783, 1998.
[7811] 1912. Zhu, W.; Lossie, A. C.; Camper, S. A.; Gumucio, D. L.: Chromosomal localization of the transcription factor YY1 in the mouse and human. Mammalian Genome 5: 234-236, 1994.
[7812] 1913. Kikuno, R.; Nagase, T.; Ishikawa, K.; Hirosawa, M.; Miyajima, N.; Tanaka, A.; Kotani, H.; Nomura, N.; Ohara, O.: Prediction of the coding sequences of unidentified human genes. XIV. The complete sequences of 100 new cDNA clones from brain which code for large proteins in vitro. DNA Res. 6: 197-205, 1999.
[7813] 1914. Gao, X.; Copeland, N. G.; Gilbert, D. J.; Jenkins, N. A.; Gridley, T.: Assignment of the murine Notch2 and Notch3 genes to chromosomes 3 and 17. Genomics 49: 160-161, 1998.
[7814] 1915. Larsson, C.; Lardelli, M.; White, I.; Lendahl, U.: The human NOTCH1, 2, and 3 genes are located at chromosome positions 9q34, 1p13-p11, and 19p13.2-p13.1 in regions of neoplasia-associated translocation. Genomics 24:253-258, 1994.
[7815] 1916. Eudy, J. D.; Yao, S.; Weston, M. D.; Ma-Edmonds, M.; Talmadge, C. B.; Cheng, J. J.; Kimberling, W. J.; Sumegi, J.: Isolation of a gene encoding a novel member of the nuclear receptor superfamily from the critical region of Usher syndrome type IIa at 1q41. Genomics 50:382-384, 1998.
[7816] 1917. Greschik, H.; Wurtz, J.-M.; Sanglier, S.; Bourguet, W.; van Dorsselaer, A.; Moras, D.; Renaud, J.-P.: Structural and functional evidence for ligand-independent transcriptional activation by the estrogen-related receptor 3. Molec. Cell 9: 303-313, 2002.
[7817] 1918. Bertilsson, G.; Heidrich, J.; Svensson, K.; Asman, M.; Jendeberg, L.; Sydow-Backman, M.; Ohlsson, R.; Postlind, H.; Blomquist, P.; Berkenstam, A.: Identification of a human nuclear receptor defines a new signaling pathway for CYP3A induction. Proc. Nat. Acad. Sci. 95: 12208-12213, 1998.
[7818] 1919. Blumberg, B.; Sabbagh, W., Jr.; Juguilon, H.; Bolado, J., Jr.; van Meter, C. M.; Ong, E. S.; Evans, R. M.: SXR, a novel steroid and xenobiotic-sensing nuclear receptor. Genes Dev. 12: 3195-3205, 1998.
[7819] 1920. Watkins, R. E.; Wisely, G. B.; Moore, L. B.; Collins, J. L.; Lambert, M. H.; Williams, S. P.; Willson, T. M.; Kliewer, S. A.; Redinbo, M. R.: The human nuclear xenobiotic receptor PXR: structural determinants of directed promiscuity. Science 292: 2329-2333, 2001.
   1921. Andre, E.; Conquet, F.; Steinmayr, M.; Stratton, S. C.; Porciatti, V.; Becker-Andre, M.: Disruption of retinoid-related orphan receptor beta changes circadian behavior, causes retinal degeneration and leads to vacillans phenotype in mice. EMBO J. 17: 3867-3877, 1998.
[7820] 1922. Paravicini, G.; Steinmayr, M.; Andre, E.; Becker-Andre, M.: Themetastasis suppressor candidate nucleotide diphosphate kinase NM23 specifically interacts with members of the ROR/RZR nuclear orphan receptor subfamily. Biochem. Biophys. Res. Commun. 227: 82-87, 1996.
[7821] 1923. Sirlin, J. L.: Vacillans, a neurological mutant in the house mouse linked with brown. J. Genet. 54: 42-48, 1956.
[7822] 1924. Fritzler, M. J.; Lung, C.-C.; Hamel, J. C.; Griffith, K. J.; Chan, E. K. L.: Molecular characterization of golgin-245, a novel Golgi complex protein containing a gran in signature. J. Biol. Chem. 270:31262-31268, 1995.
[7823] 1925. Heard, D. J.; Norby, P. L.; Holloway, J.; Vissing, H.: Human ERR-gamma, a third member of the estrogen receptor-related receptor (ERR) subfamily of orphan nuclear receptors: tissue-specific isoforms are expressed during development in the adult. Molec. Endocr. 14: 382-392, 2000.
   1926. Hong, H.; Yang, L.; Stallcup, M. R.: Hormone-independent transcriptional activation and coactivator binding by novel orphan nuclear receptor ERR3. J. Biol. Chem. 274: 22618-22626, 1999.
[7824] 1927. Kooy, J.; Toh, B.-H.; Pettitt, J. M.; Erlich, R.; Gleeson, P. A.: Human autoantibodies as reagents to conserved Golgi components: characterization of a peripheral, 230-kDa compartment-specific Golgi protein. J. Biol. Chem. 267: 20255-20263, 1992.
[7825] 1928. Zheng, B.; Chen, D.; Farquhar, M. G.: MIR16, a putative membrane glycerophosphodiester phosphodiesterase, interacts with RGS16. Proc. Nat. Acad. Sci. 97: 3999-4004, 2000.
[7826] 1929. Bergelson, J. M.; Cunningham, J. A.; Droguett, G.; Kurt-Jones, E. A.; Krithivas, A.; Hong, J. S.; Horwitz, M. S.; Crowell, R. L.; Finberg, R. W.: Isolation of a common receptor for coxsackie B viruses and adenoviruses 2 and 5. Science 275: 1320-1323, 1997.
[7827] 1930. Bowles, K. R.; Gibson, J.; Wu, J.; Shaffer, L. G.; Towbin, J. A.; Bowles, N. E.: Genomic organization and chromosomal localization of the human Coxsackie virus Badeno virus receptor gene. Hum. Genet. 105:354-359, 1999.
   1931. Carson, S. D.; Chapman, N. N.; Tracy, S. M.: Purification of the putative coxsackie virus B receptor from HeLa cells. Biochem. Biophys. Res. Commun. 233: 325-328, 1997.
[7828] 1932. Griffin, L. D.; Kearney, D.; Ni, J.; Jaffe, R.; Fricker, F. J.; Webber, S.; Demmler, G.; Gelb, B. D.; Towbin, J. A.: Analysis of formalin-fixed and frozen myocardial autopsy samples for viral genome in childhood myocarditis and dilated cardiomyopathy with endocardial fibroelastosis using polymerase chain reaction (PCR). Cardiovasc. Path. 4: 3-11, 1995.
[7829] 1933. Martin, A. B.; Webber, S.; Fricker, F. J.; Jaffe, R.; Demmler, G.; Kearney, D.; Zhang, Y.-H.; Bodurtha, J.; Gelb, B.; Ni, J.; Bricker, J. T.; Towbin, J. A.: Acute myocarditis: rapid diagnosis by PCR in children. Circulation 90: 330-339, 1994.
[7830] 1934. Pauschinger, M.; Bowles, N. E.; Fuentes-Garcia, F. J.; Pham, V.; Kuhl, U.; Schwimmbeck, P. L.; Schultheiss, H.-P.; Towbin, J. A.: Detection of adenoviral genome in the myocardium of adult patients with idiopathic left ventricular dysfunction. Circulation 99: 1348-1354, 1999.
[7831] 1935. Tomko, R. P.; Xu, R.; Philipson, L.: HCAR and MCAR: the human and mouse receptors for subgroup C adenoviruses and group B coxsackie viruses. Proc. Nat. Acad. Sci. 94: 3352-3356, 1997.
[7832] 1936. Zhang, J.; Kuehl, P.; Green, E. D.; Touchman, J. W.; Watkins, P. B.; Daly, A.; Hall, S. D.; Maurel, P.; Relling, M.; Brimer, C.; Yasuda, K.; Wrighton, S. A.; Hancock, M.; Kim, R. B.; Strom, S.; Thummel, K.; Russell, C. G.; Hudson, J. R., Jr.; Schuetz, E. G.; Boguski, M. S.: The human pregnane X receptor: genomic structure and identification and functional characterization of natural allelic variants. Pharmacogenetics 11:555-572, 2001.
[7833] 1937. Su, L.-K.; Qi, Y.: Characterization of human MAPRE genes and their proteins. Genomics 71: 143-149, 2001.
[7834] 1938. Wicki, R.; Marenholz, I.; Mischke, D.; Schafer, B. W.; Heizmann, C. W.: Characterization of the human S100A12 (calgranulin C, p6, CAAF1, CGRP) gene, a new member of the S100 gene cluster on chromosome 1q21. Cell Calcium 20: 459-464, 1996.
[7835] 1939. Brandt, S.; Jentsch, T. J.: ClC-6 and ClC-7 are two novel broadly expressed members of the CLC chloride channel family. FEBS Lett. 377:15-20, 1995.
[7836] 1940. Eggermont, J.; Buyse, G.; Voets, T.; Tytgat, J.; De Smedt, H.; Droogmans, G.: Alternative splicing of ClC-6 (a member of the ClC chloride-channel family) transcripts generates three truncated isoforms one of which, ClC-6c, is kidney-specific. Biochem. J. 325: 269-276, 1997.
[7837] 1941. Nagase, T.; Ishikawa, K.; Suyama, M.; Kikuno, R.; Hirosawa, M.; Miyajima, N.; Tanaka, A.; Kotani, H.; Nomura, N.; Ohara, O.: Prediction of the coding sequences of unidentified human genes. XiII. The complete sequences of 100 new cDNA clones from brain which code for large proteins in vitro. DNA Res. 6: 63-70, 1999.
[7838] 1942. Arico, M.; Imashuku, S.; Clementi, R.; Hibi, S.; Teramura, T.; Danesino, C.; Haber, D. A.; Nichols, K. E.: Hemophagocytic lymphohistiocytosis due to germline mutations in SH2D1A, the X-linked lymphoproliferative disease gene. Blood 97: 1131-1133, 2001.
[7839] 1943. Arkwright, P. D.; Makin, G.; Will, A. M.; Ayres, M.; Gokhale, D. A.; Fergusson, W. D.; Taylor, G. M.: X linked lymphoproliferative disease in a United Kingdom family. Arch. Dis. Child. 79: 52-55, 1998.
[7840] 1944. Bar, R. S.; DeLor, C. J.; Clausen, K. P.; Hurtubise, P.; Henle, W.; Hewetson, J. F.: Fatal infectious mononucleosis in a family. New Eng. J. Med. 290: 363-367, 1974.
[7841] 1945. Benoit, L.; Wang, X.; Pabst, H. F.; Dutz, J.; Tan, R.: Cutting edge: defective NK cell activation in X-linked lymphoproliferative disease. J. Immun. 165: 3549-3553, 2000.
[7842] 1946. Brandau, O.; Schuster, V.; Weiss, M.; Hellebrand, H.; Fink, F. M.; Kreczy, A.; Friedrich, W.; Strahm, B.; Niemeyer, C.; Belohradsky, B. H.; Meindl, A.: Epstein-Barr virus-negative boys with non-Hodgkin lymphoma are mutated in the SH2D1A gene, as are patients with X-linked lymphoproliferative disease (XLP). Hum. Molec. Genet. 8: 2407-2413, 1999.
[7843] 1947. Coffey, A. J.; Brooksbank, R. A.; Brandau, O.; Oohashi, T.; Howell, G. R.; Bye, J. M.; Cahn, A. P.; Durham, J.; Heath, P.; Wray, P.; Pavitt, R.; Wilkinson, J.; and 31 others: Host response to EBV infection in X-linked lymphoproliferative disease results from mutations in an SH2-domain encoding gene. Nature Genet. 20: 129-135, 1998.
[7844] 1948. Czar, M. J.; Kersh, E. N.; Mijares, L. A.; Lanier, G.; Lewis, J.; Yap, G.; Chen, A.; Sher, A.; Duckett, C. S.; Ahmed, R.; Schwartzberg, P. L.: Altered lymphocyte responses and cytokine production in mice deficient in the X-linked lymphoproliferative disease gene SH2D1A/DSHP/SAP. Proc. Nat. Acad. Sci. 98: 7449-7454, 2001.
[7845] 1949. Dutz, J. P.; Benoit, L.; Wang, X.; Demetrick, D. J.; Junker, A.; de Sa, D.; Tan, R.: Lymphocytic vasculitis in X-linked lymphoproliferative disease. Blood 97: 95-100, 2001.
[7846] 1950. Grierson, H. L.; Skare, J.; Church, J.; Silberman, T.; Davis, J. R.; Kobrinsky, N.; McGregor, R.; Israels, S.; McCarty, J.; Andrews, L. G.; Blecha, T.; Erdman, S.; Obringer, A.; Scharnhorst, D.; Purtilo, D. T.: Evaluation of families wherein a single male manifests a phenotype of X-linked lymphoproliferative disease (XLP). Am. J. Med. Genet. 47:458-463, 1993.
[7847] 1951. Hambleton, G.; Cottom, D. G.: Familial lymphoma. Proc. Roy. Soc. Med. 62: 1095 only, 1969.
[7848] 1952. Hamilton, J. K.; Paquin, L. A.; Sullivan, J. L.; Maurer, H. S.; Cruzi, F. G.; Provisor, A. J.; Steuber, C. P.; Hawkins, E.; Yawn, D.; Cornet, J.; Clausen, K.; Finkelstein, G. Z.; Landing, B.; Grunnet, M.; Purtilo, D. T.: X-linked lymphoproliferative syndrome registry report. J. Pediat. 96: 669-673, 1980.
[7849] 1953. Harris, A.; Docherty, Z.: X-linked lymphoproliferative disease: a karyotype analysis. Cytogenet. Cell Genet. 47: 92-94, 1988.
[7850] 1954. Harris, A.; Lenoir, G. M.; Lankester, S. A.: X-linked lymphoproliferative disease: linkage studies using DNA probes. Clin. Genet. 33: 162-168, 1988.
   1955. Hayoz, D.; Lenoir, G. M.; Nicole, A.; Pugin, P.; Regamey, C.: X-linked lymphoproliferative syndrome: identification of a large family in Switzerland. Am. J. Med. 84: 529-534, 1988.
[7851] 1956. Klein, G.; Klein, E.: Sinking surveillance's flagship. Nature 395:441-445, 1998.
[7852] 1957. Levine, P. H.; Kamaraju, L. S.; Connelly, R. R.; Berard, C. W.; Dorfman, R. F.; Magrath, I.; Easton, J. M.: The American Burkitt's Lymphoma Registry: eight years' experience. Cancer 49: 1016-1022, 1982.
[7853] 1958. Loeffel, S.; Chang, C.-H.; Heyn, R.; Harada, S.; Lipscomb, H.; Sinangil, F.; Volsky, D. J.; McClain, K.; Ochs, H.; Purtilo, D. T.: Necrotizing lymphoid vasculitis in X-linked lymphoproliferative syndrome. Arch. Path. Lab. Med. 109: 546-550, 1985.
[7854] 1959. Lyon, M. F.; Loutit, J. F.: X-linked factor in acquired immunodeficiency syndrome?. (Letter) Lancet I: 768 only, 1983.
[7855] 1960. Mulley, J. C.; Turner, A. M.; Gedeon, A. K.; Berdoukas, V. A.; Huang, T. H. M.; Ledbetter, D. H.; Grierson, H.; Purtilo, D. T.: X-linked lymphoproliferative disease: prenatal detection of an unaffected histocompatible male. Clin. Genet. 42: 76-79, 1992.
   1961. Dai, K.-S.; Liew, C.-C.: A novel human striated muscle RING zinc finger protein, SMRZ, interacts with SMT3b via its RING domain. J. Biol. Chem. 276: 23992-23999, 2001.
[7856] 1962. Zheng, B.; Albrecht, U.; Kaasik, K.; Sage, M.; Lu, W.; Vaishnav, S.; Li, Q.; Sun, Z. S.; Eichele, G.; Bradley, A.; Lee, C. C.: Nonredundant roles of the mPer1 and mPer2 genes in the mammalian circadian clock. Cell 105:683-694, 2001.
[7857] 1963. Rulten, S.; Thorpe, J.; Kay, J.: Identification of eukaryotic parvulin homologues: a new subfamily of peptidylprolyl cis-trans isomerases. Biochem. Biophys. Res. Commun. 259: 557-562, 1999.
[7858] 1964. Ichinose, H.; Ohye, T.; Suzuki, T.; Sumi-Ichinose, C.; Nomura, T.; Hagino, Y.; Nagatsu, T.: Molecular cloning of the human Nurr1 gene: characterization of the human gene and cDNAs. Gene 230: 233-239, 1999.
[7859] 1965. Law, S. W.; Conneely, O. M.; DeMayo, F. J.; O'Malley, B. W.: Identification of a new brain-specific transcription factor, NURR1. Molec. Endocr. 6:2129-2135, 1992.
[7860] 1966. Mages, H. W.; Rilke, O.; Bravo, R.; Senger, G.; Kroczek, R. A.: NOT, a human immediate-early response gene closely related to the steroid/thyroid hormone receptor NAK1/TR3. Molec. Endocr. 8: 1583-1591, 1994.
[7861] 1967. McEvoy, A. N.; Murphy, E. A.; Ponnio, T.; Conneely, O. M.; Bresnihan, B.; FitzGerald, O.; Murphy, E. P.: Activation of nuclear orphan receptor NURR1 transcription by NF-kappa B and cyclic adenosine 5-prime-monophosphate response element-binding protein in rheumatoid arthritis synovial tissue. J. Immun. 168: 2979-2987, 2002.
[7862] 1968. Okabe, T.; Takayanagi, R.; Imasaki, K.; Haji, M.; Nawata, H.; Watanabe, T.: cDNA cloning of a NGFIB/nur77-related transcription factor from an apoptotic human T cell line. J. Immun. 154: 3871-3879, 1995.
[7863] 1969. Torii, T.; Kawarai, T.; Nakamura, S.; Kawakami, H.: Organization of the human orphan nuclear receptor Nurr1 gene. Gene 230: 225-232, 1999.
[7864] 1970. Xu, P.-Y.; Liang, R.; Jankovic, J.; Hunter, C.; Zeng, Y.-X.; Ashizawa, T.; Lai, D.; Le, W.-D.: Association of homozygous 7048G7049 variant in the intron six of Nurr1 gene with Parkinson's disease. Neurology 58:881-884, 2002.
[7865] 1971. Kershaw, D. B.; Beck, S. G.; Wharram, B. L.; Wiggins, J. E.; Goyal, M.; Thomas, P. E.; Wiggins, R. C.: Molecular cloning and characterization of human podocalyxin-like protein: orthologous relationship to rabbit PCLP1 and rat podocalyxin. J. Biol. Chem. 272: 15708-15714, 1997.
[7866] 1972. Kershaw, D. B.; Wiggins, J. E.; Wharram, B. L.; Wiggins, R. C.: Assignment of the human podocalyxin-like protein (PODXL) gene to 7q32-q33. Genomics 45: 239-240, 1997.
[7867] 1973. Mankodi, A.; Urbinati, C. R.; Yuan, Q.-P.; Moxley, R. T.; Sansone, V.; Krym, M.; Henderson, D.; Schalling, M.; Swanson, M. S.; Thornton, C. A.: Muscle blind localizes to nuclear foci of aberrant RNA in myotonic dystrophy types 1 and 2. Hum. Molec. Genet. 10: 2165-2170, 2001.
[7868] 1974. Ichikawa, S.; Ozawa, K.; Hirabayashi, Y.: Assignment of a UDP-glucose: ceramideglucosyltransferase gene (Ugcg) to mouse chromosome band 4B3 by insitu hybridization. Cytogenet. Cell Genet. 83: 14-15, 1998.
[7869] 1975. Ichikawa, S.; Ozawa, K.; Hirabayashi, Y.: Assignment of a UDP-glucose: ceramideglucosyltransferase gene (UGCG) to human chromosome band 9q31 by insitu hybridization. Cytogenet. Cell Genet. 79: 233-234, 1997.
[7870] 1976. Ichikawa, S.; Sakiyama, H.; Suzuki, G.; Hidari, K. I.-P. J.; Hirabayashi, Y.: Expression cloning of a cDNA for human ceramide glucosyltransferase that catalyzes the first glycosylation step of glycosphingolipid synthesis. Proc. Nat. Acad. Sci. 93: 4638-4643, 1996.
[7871] 1977. Watanabe, R.; Wu, K.; Paul, P.; Marks, D. L.; Kobayashi, T.; Pittelkow, M. R.; Pagano, R. E.: Upregulation of glucosylceramide synthase expression and activity during human keratinocyte differentiation. J. Biol. Chem. 273: 9651-9655, 1998.
[7872] 1978. Strahm, B.; Rittweiler, K.; Duffner, U.; Brandau, O.; Orlowska-Volk, M.; Karajannis, M. A.; zur Stadt, U.; Tiemann, M.; Reiter, A.; Brandis, M.; Meindl, A.; Niemeyer, C. M.: Recurrent B-cell non-Hodgkin's lymphomain two brothers with X-linked lymphoproliferative disease without evidence for Epstein-Barr virus infection. Brit. J. Haemat. 108:377-382, 2000.
[7873] 1979. Sylla, B. S.; Murphy, K.; Cahir-McFarland, E.; Lane, W. S.; Mosialos, G.; Kieff, E.: The X-linked lymphoproliferative syndrome gene product SH2D1A associates with p62(dok) (Dok1) and activates NF-kappa-beta. Proc. Nat. Acad. Sci. 97: 7470-7475, 2000.
[7874] 1980. Sylla, B. S.; Wang, Q.; Hayoz, D.; Lathrop, G. M.; Lenoir, G. M.: Multipoint linkage mapping of the Xq25-q26 region in a family affected by the X-linked lymphoproliferative syndrome. Clin. Genet. 36:359-462, 1989.
[7875] 1981. Tangye, S. G.; Lazetic, S.; Woollatt, E.; Sutherland, G. R.; Lanier, L. L.; Phillips, J. H.: Cutting edge: human 2B4, an activating NKcell receptor, recruits the protein tyrosine phosphatase SHP-2 and the adaptor signaling protein SAP. J. Immun. 162: 6981-6985, 1999.
[7876] 1982. Tangye, S. G.; Phillips, J. H.; Lanier, L. L.; Nichols, K. E.: Cutting edge: functional requirement for SAP in 2B4-mediated activation of human natural killer cells as revealed by the X-linked lymphoproliferative syndrome. J. Immun. 165: 2932-2936, 2000.
[7877] 1983. Thorley-Lawson, D. A.; Schooley, R. T.; Bhan, A. K.; Nadler, L. M.: Epstein-Barr virus superinduces a new human B cell differentiation antigen (B-LAST 1) expressed on transformed lymphoblasts. Cell 30:415-425, 1982.
[7878] 1984. Vowels, M. R.; Lam-Po-Tang, R.; Berdoukas, V.; Ford, D.; Thierry, D.; Purtilo, D.; Gluckman, E.: Correction of X-linked lymphoproliferative disease by transplantation of cord-blood stem cells. New Eng. J. Med. 329: 1623-1625, 1993.
[7879] 1985. Williams, L. L.; Rooney, C. M.; Conley, M. E.; Brenner, M. K.; Krance, R. A.; Heslop, H. E.: Correction of Duncan's syndrome by allogeneic bone marrow transplantation. Lancet 342: 587-588, 1993.
[7880] 1986. Wu, C.; Nguyen, K. B.; Pien, G. C.; Wang, N.; Gullo, C.; Duncan, H.; Sosa, M. R.; Edwards, M. J.; Borrow, P.; Satoskar, A. R.; Sharpe, A. H.; Biron, C. A.; Terhorst, C.: SAP controls T cell responses to virus and terminal differentiation of T(H)2 cells. Nature Immun. 2:410-414, 2001.
[7881] 1987. Wyandt, H. E.; Skare, J. C.; Grierson, H. L.; Purtilo, D. T.; Milunsky, A.: Detection of a chromosomal deletion of Xq25 in an affected male with X-linked lymphoproliferative disease. (Abstract) Am. J. Hum. Genet. 45 (suppl.): A108 only, 1989.
[7882] 1988. Yin, L.; Ferrand, V.; Lavoue, M.-F.; Hayoz, D.; Philippe, N.; Souillet, G.; Seri, M.; Giacchino, R.; Castagnola, E.; Hodgson, S.; Sylla, B. S.; Romeo, G.: SH2D1A mutation analysis for diagnosis of XLP in typical and a typical patients. Hum. Genet. 105: 501-505, 1999.
[7883] 1989. Yin, L.; Tocco, T.; Pauly, S.; Lenoir, G. M.; Romeo, G.: Absence of SH2D1A point mutation in 62 Burkitts lymphoma cell lines. Am. J. Hum. Genet. 65 (suppl. 1868): A331 only, 1999.
[7884] 1990. Dinulos, M. B.; Bassi, M. T.; Rugarli, E. I.; Chapman, V.; Ballabio, A.; Disteche, C. M.: A new region of conservation is defined between human and mouse X chromosomes. Genomics 35: 244-247, 1996.
[7885] 1991. Schiaffino, M. V.; Bassi, M. T.; Rugarli, E. I.; Renieri, A.; Galli, L.; Ballabio, A.: Cloning of a human homologue of the Xenopus laevis APX gene from the ocular albinism type 1 critical region. Hum. Molec. Genet. 4: 373-382, 1995.
[7886] 1992. Bachner, D.; Sedlacek, Z.; Korn, B.; Hameister, H.; Poustka, A.: Expression patterns of two human genes coding for different rabGDP-dissociation inhibitors (GDls), extremely conserved proteins involved in cellular transport. Hum. Molec. Genet. 4: 701-708, 1995.
[7887] 1993. Kang, H.-Y.; Yeh, S.; Fujimoto, N.; Chang, C.: Cloning and characterization of human prostate coactivator ARA54, a novel protein that associates with the androgen receptor. J. Biol. Chem. 274: 8570-8576, 1999.
[7888] 1994. Foresta, C.; Ferlin, A.; Moro, E.: Deletion and expression analysis of AZFa genes on the human Y chromosome revealed a major role for DBY in male infertility. Hum. Molec. Genet. 9: 1161-1169, 2000.
[7889] 1995. Shen, P.; Wang, F.; Underhill, P. A.; Franco, C.; Yang, W.-H.; Roxas, A.; Sung, R.; Lin, A. A.; Hyman, R. W.; Vollrath, D.; Davis, R. W.; Cavalli-Sforza, L. L.; Oefner, P. J.: Population genetic implications from sequence variation in four Y chromosome genes. Proc. Nat. Acad. Sci. 97: 7354-7359, 2000.
[7890] 1996. Scott, D.; Addey, C.; Ellis, P; James, E.; Mitchell, M. J.; Saut, N.; Jurcevic, S.; Simpson, E.: Dendritic cells permit identification of genes encoding MHC class II-restricted epitopes of transplantation antigens. Immunity 12: 711-720, 2000.
[7891] 1997. Wu, G.; Chai, J.; Suber, T. L.; Wu, J.-W.; Du, C.; Wang, X.; Shi, Y.: Structural basis of IAP recognition by Smac/DIABLO. Nature 408:1008-1012, 2000.
[7892] 1998. Nakamura, H.; Izumoto, Y.; Kambe, H.; Kuroda, T.; Mori, T.; Kawamura, K.; Yamamoto, H.; Kishimoto, T.: Molecular cloning of complementary DNA for a novel human hepatoma-derived growth factor: its homology with high mobility group-1 protein. J. Biol. Chem. 269: 25143-25149, 1994.
[7893] 1999. Wanschura, S.; Schoenmakers, E. F. P. M.; Huysmans, C.; Bartnitzke, S.; Van de Ven, W. J. M.; Bullerdiek, J.: Mapping of the gene encoding the human hepatoma-derived growth factor (HDGF) with homology to the high-mobility group (HMG)-1 protein to Xq25. Genomics 32: 298-300, 1996.
[7894] 2000. Ishibashi, T.; Bottaro, D. P.; Michieli, P.; Kelley, C. A.; Aaronson, S. A.: A novel dual specificity phosphatase induced by serum stimulation and heat shock. J. Biol. Chem. 269: 29897-29902, 1994.
   2001. Kwak, S. P.; Dixon, J. E.: Multiple dual specificity protein tyrosine phosphatases are expressed and regulated differentially in liver cell lines. J. Biol. Chem. 270: 1156-1160, 1995.
[7895] 2002. Lin, J.; Arnold, H. B.; Della-Fera, M. A.; Azain, M. J.; Hartzell, D. L.; Baile, C. A.: Myostatin knockout in mice increases myogenesis and decreases adipogenesis. Biochem. Biophys. Res. Commun. 291:701-706, 2002.
[7896] 2003. McPherron, A. C.; Lawler, A. M.; Lee, S.-J.: Regulation of skeletal muscle mass in mice by a new TGF-beta superfamily member. Nature 387:83-90, 1997.
[7897] 2004. Meyerhardt, J. A.; Look, A. T.; Bigner, S. H.; Fearon, E. R.: Identification and characterization of neogenin, a DCC-related gene. Oncogene 14:1129-1136, 1997.
[7898] 2005. Vielmetter, J.; Chen, X.-N.; Miskevich, F.; Lane, R. P.; Yamakawa, K.; Korenberg, J. R.; Dreyer, W. J.: Molecular characterization of human neogenin, a DCC-related protein, and the mapping of its gene (NEO1) to chromosomal position 15q22.3-q23. Genomics 41: 414-421, 1997.
[7899] 2006. Vielmetter, J.; Kayyem, J. F.; Roman, J. M.; Dreyer, W. J.: Neogenin, an avian cell surface protein expressed during terminal neuronal differentiation, is closely related to the human tumor suppressor molecule deleted in colorectal cancer. J. Cell Biol. 127: 2009-2020, 1994.
[7900] 2007. Donghi, R.; Sozzi, G.; Pierotti, M. A.; Biunno, I.; Miozzo, M.; Fusco, A.; Grieco, M.; Santoro, M.; Vecchio, G.; Spurr, N. K.; DellaPorta, G.: The oncogene associated with human papillary thyroid carcinoma (PTC) is assigned to chromosome 10q11-q12 in the same region as multiple endocrine neoplasia type 2A (MEN2A). Oncogene 4: 521-523, 1989.
[7901] 2008. Nikiforova, M. N.; Stringer, J. R.; Blough, R.; Medvedovic, M.; Fagin, J. A.; Nikiforov, Y. E.: Proximity of chromosomal loci that participate in radiation-induced rearrangements in human cells. Science 290:138-141, 2000.
[7902] 2009. Sozzi, G.; Pierotti, M. A.; Miozzo, M.; Donghi, R.; Radice, P.; De Benedetti, V.; Grieco, M.; Santoro, M.; Fusco, A.; Vecchio, G.; Mathew, C. G. P.; Ponder, B. A. J.; Spurr, N. K.: Refined localization to contiguous regions on chromosome 10q of the two genes (H4 and RET) that form the oncogenic sequence PTC. Oncogene 6: 339-342, 1991.
[7903] 2010. Tong, Q.; Li, Y.; Smanik, P. A.; Fithian, L. J.; Xing, S.; Mazzaferri, E. L.; Jhiang, S. M.: Characterization of the promoter region and oligomerization domain of H4 (D10S170), a gene frequently rearranged with the ret proto-oncogene. Oncogene 10: 1781-1787, 1995.
   2011. Spicer, A. P.; Olson, J. S.; McDonald, J. A.: Molecular cloning and characterization of a cDNA encoding the third putative mammalian hyaluronan synthase. J. Biol. Chem. 272: 8957-8961, 1997.
[7904] 2012. Bingle, C. D.; Gowan, S.: Molecular cloning of the fork head transcription factor HNF-3-alpha from a human pulmonary adenocarcinoma cell line. Biochim. Biophys. Acta 1307: 17-20, 1996.
[7905] 2013. Cushman, L. J.; Camper, S. A.: Molecular basis of pituitary dysfunction in mouse and human. Mammalian Genome 12: 485-494, 2001.
[7906] 2014. Biamonti, G.; Ruggiu, M.; Saccone, S.; Della Valle, G.; Riva, S.: Two homologous genes, originated by duplication, encode the human hnRNP proteins A2 and A1. Nucleic Acids Res. 22: 1996-2002, 1994.
[7907] 2015. Nagase, T.; Seki, N.; Ishikawa, K.; Ohira, M.; Kawarabayasi, Y.; Ohara, O.; Tanaka, A.; Kotani, H.; Miyajima, N.; Nomura, N.: Prediction of the coding sequences of unidentified human genes. VI. The coding sequences of 80 new genes (KIAA0201-KIAA0280) deduced by analysis of cDNA clones from cell line KG-1 and brain. DNA Res. 3: 321-329, 1996. Note: Supplement: DNA Res. 3: 341-354, 1996.
   2016. Numata, M.; Petrecca, K.; Lake, N.; Orlowski, J.: Identification of a mitochondrial Na+/H+ exchanger. J. Biol. Chem. 273: 6951-6959, 1998.
[7908] 2017. Nakano, H.; Oshima, H.; Chung, W.; Williams-Abbott, L.; Ware, C. F.; Yagita, H.; Okumura, K.: TRAF5, an activator of NF-kappaB and putative signal transducer for the lymphotoxin-beta receptor. J. Biol. Chem. 271: 14661-14664, 1996.
[7909] 2018. Nakano, H.; Sakon, S.; Koseki, H.; Takemori, T.; Tada, K.; Matsumoto, M.; Munechika, E.; Sakai, T.; Shirasawa, T.; Akiba, H; Kobata, T.; Santee, S. M.; Ware, C. F.; Renner, P. D.; Taniguchi, M.; Yagita, H.; Okumura, K.: Targeted disruption of Traf5 gene causes defects in CD40- and CD27-mediated lymphocyte activation. Proc. Nat. Acad. Sci. 96: 9803-9808, 1999.
[7910] 2019. Nakano, H.; Shindo, M.; Yamada, K.; Yoshida, M. C.; Santee, S. M.; Ware, C. F.; Jenkins, N. A.; Gilbert, D. J.; Yagita, H.; Copeland, N. G.; Okumura, K.: Human TNF receptor-associated factor 5 (TRAF5): cDNA cloning, expression and assignment of the TRAF5 gene to chromosome 1q32. Genomics 42: 26-32, 1997.
[7911] 2020. Fernandez-Valle, C.; Tang, Y.; Ricard, J.; Rodenas-Ruano, A.; Taylor, A.; Hackler, E.; Biggerstaff, J.; Iacovelli, J.: Paxillin binds schwannomin and regulates its density-dependent localization and effect on cell morphology. Nature Genet. 31: 354-362, 2002.
[7912] 2021. Glenney, J. R., Jr.; Zokas, L.: Novel tyrosine kinase substrates from Rous sarcoma virus-transformed cells are present in the membrane skeleton. J. Cell Biol. 108: 2401-2408, 1989.
[7913] 2022. Mazaki, Y.; Hashimoto, S.; Sabe, H.: Monocyte cells and cancer cells express novel paxillin isoforms with different binding properties to focal adhesion proteins. J. Biol. Chem. 272: 7437-7444, 1997.
[7914] 2023. Salgia, R.; Li, J.-L.; Lo, S. H.; Brunkhorst, B.; Kansas, G. S.; Sobhany, E. S.; Sun, Y.; Pisick, E.; Hallek, M.; Ernst, T.; Tantravahi, R.; Chen, L. B.; Griffin, J. D.: Molecular cloning of human paxillin, a focal adhesion protein phosphorylated by P210(BCR/ABL). J. Biol. Chem. 270: 5039-5047, 1995.
[7915] 2024. Turner, C. E.; Glenney, J. R., Jr.; Burridge, K.: Paxillin: anew vinculin-binding protein present in focal adhesions. J. Cell Biol. 111: 1059-1068, 1990.
[7916] 2025. Adachi, H.; Tsujimoto, M.; Hattori, M.; Arai, H.; Inoue, K.: Differential tissue distribution of the beta- and gamma-subunits of human cytosolic platelet-activating factor acetylhydrolase (isoform 1). Biochem. Biophys. Res. Commun. 233: 10-13, 1997.
[7917] 2026. Moro, F.; Arrigo, G.; Fogli, A.; Bernard, L.; Carrozzo, R.: Thebeta and gamma subunits of the human platelet-activating factor acetylhydrolase isoform Ib (PAFAH1B2 and PAFAH1B3) map to chromosome 11q23 and 19q13.1, respectively. Genomics 51: 157-159, 1998.
[7918] 2027. Daigo, Y.; Isomura, M.; Nishiwaki, T.; Tamari, M.; Ishikawa, S.; Kai, M.; Murata, Y.; Takeuchi, K.; Yamane, Y.; Hayashi, R.; Minami, M.; Fujino, M. A.; Hojo, Y.; Uchiyama, I.; Takagi, T.; Nakamura, Y.: Characterization of a 1200-kb genomic segment of chromosome 3p22-p21.3. DNARes. 6: 37-44, 1999.
[7919] 2028. Erlich, R.; Gleeson, P. A.; Campbell, P.; Dietzsch, E.; Toh, B.-H.: Molecular characterization of trans-Golgi p230: a human peripheral membrane protein encoded by a gene on chromosome 6p12-22 contain sextensive coiled-coil alpha-helical domains and a granin motif. J. Biol. Chem. 271: 8328-8337, 1996.
[7920] 2029. Giachino, C.; Lantelme, E.; Lanzetti, L.; Saccone, S.; Della Valle, G.; Migone, N.: A novel SH3-containing human gene family preferentially expressed in the central nervous system. Genomics 41: 427-434, 1997.
   2030. Shisheva, A.; Sudhof, T. C.; Czech, M. P.: Cloning, characterization, and expression of a novel GDP dissociation inhibitor isoform from skeletal muscle. Molec. Cell. Biol. 14: 3459-3468, 1994.
[7921] 2031. Peters, A. H. F. M.; O'Carroll, D.; Scherthan, H.; Mechtler, K.; Sauer, S.; Schofer, C.; Weipoltshammer, K.; Pagani, M.; Lachner, M.; Kohlmaier, A.; Opravil, S.; Doyle, M.; Sibilia, M.; Jenuwein, T.: Loss of the Suv39h histone methyltransferases impairs mammalian heterochromatin and genome stability. Cell 107: 323-337, 2001.
[7922] 2032. Haltiwanger, R. S.; Blomberg, M. A.; Hart, G. W.: Glycosylation of nuclear and cytoplasmic proteins: purification and characterization of a uridine diphospho-N-acetylglucosamine: polypeptide beta-N-acetylglucosaminyltransferase. J. Biol. Chem. 267: 9005-9013, 1992.
[7923] 2033. Kreppel, L. K.; Blomberg, M. A.; Hart, G. W.: Dynamic glycosylation of nuclear and cytosolic proteins: cloning and characterization of a unique O-GlcNAc transferase with multiple tetratricopeptide repeats. J. Biol. Chem. 272: 9308-9315, 1997.
[7924] 2034. Lubas, W. A.; Frank, D. W.; Krause, M.; Hanover, J. A.: O-linked GlcNAc transferase is a conserved nucleocytoplasmic protein containing tetratricopeptide repeats. J. Biol. Chem. 272: 9316-9324, 1997.
[7925] 2035. Shafi, R.; Iyer, S. P. N.; Ellies, L. G.; O'Donnell, N.; Marek, K. W.; Chui, D.; Hart, G. W.; Marth, J. D.: The OGlcNAc transferase gene resides on the X chromosome and is essential for embyronic stem cell viability and mouse ontogeny. Proc. Nat. Acad. Sci. 97: 5735-5739, 2000.
[7926] 2036. Yang, X.; Zhang, F.; Kudlow, J. E.: Recruitment of OGlcNAc transferase to promoters by corepressor mSin3A: coupling protein O-GlcNAcylation to transcriptional repression. Cell 110: 69-80, 2002.
[7927] 2037. Gecz, J.; Baker, E.; Donnelly, A.; Ming, J. E.; McDonald-McGinn, D. M.; Spinner, N. B.; Zackai, E. H.; Sutherland, G. R.; Mulley, J. C.: Fibroblast growth factor homologous factor 2 (FHF2): gene structure, expression and mapping to the Borjeson-Forssman-Lehmann syndrome region in Xq26 delineated by a duplication breakpoint in a BFLS-like patient. Hum. Genet. 104: 56-63, 1999.
[7928] 2038. Lovec, H.; Hartung, H.; Verdier, A.-S.; Mattei, M.-G.; Birnbaum, D.; Goldfarb, M.; Coulier, F.: Assignment of FGF13 to human chromosome band Xq21 by in situ hybridization. Cytogenet. Cell Genet. 76: 183-184, 1997.
[7929] 2039. Smallwood, P. M.; Munoz-Sanjuan, I.; Tong, P.; Macke, J. P.; Hendry, S. H. C.; Gilbert, D. J.; Copeland, N. G.; Jenkins, N. A.; Nathans, J.: Fibroblast growth factor (FGF) homologous factors: new members of the FGF family implicated in nervous system development. Proc. Nat. Acad. Sci. 93: 9850-9857, 1996.
[7930] 2040. Nauseef, W. M.; Brigham, S.; Cogley, M.: Hereditary myeloperoxidase deficiency due to a missense mutation of arginine 569 to tryptophan. J. Biol. Chem. 269: 1212-1216, 1994.
[7931] 2041. Busard, B. L. S. M.; Renier, W. O.; Gabreels, F. J. M.; Jaspar, H. H. J.; van Haelst, U. J. G.; Slooff, J. L.: Lafora's disease: comparison of inclusion bodies in skin and in brain. Arch. Neurol. 43:296-299, 1986.
[7932] 2042. Busard, H. L. S. M.; Gabreels-Festen, A. A. W. M.; Renier, W. O.; Gabreels, F. J. M.; Stadhouders, A. M.: Axilla skin biopsy: a reliable test for the diagnosis of Lafora's disease. Ann. Neurol. 21: 599-601, 1987.
[7933] 2043. Fluharty, A. L.; Porter, M. T.; Hirsh, G. A.; Pevida, E.; Kihara, H.: Metachromasia in fibroblasts from a patient with Lafora's disease. (Letter) Lancet II: 109-110, 1970.
[7934] 2044. Ganesh, S.; Agarwala, K. L.; Ueda, K.; Akagi, T.; Shoda, K.; Usui, T.; Hashikawa, T.; Osada, H.; Delgado-Escueta, A. V.; Yamakawa, K.: Laforin, defective in the progressive myoclonus epilepsy of Laforatype, is a dual-specificity phosphatase associated with polyribosomes. Hum. Molec. Genet. 9: 2251-2261, 2000.
[7935] 2045. Gomez-Garre, P.; Sanz, Y.; Rodriguez de Cordoba, S.; Serratosa, J. M.: Mutational spectrum of the EPM2A gene in progressive myoclonusepilepsy of Lafora: high degree of allelic heterogeneity and prevalence of deletions. Europ. J. Hum. Genet. 8: 946-954, 2000.
[7936] 2046. Harriman, D. G. F.; Millar, J. H. D.: Progressive familial myoclonicepilepsy in 3 families: its clinical features and pathological basis. Brain 78:325-349, 1955.
[7937] 2047. Janeway, R.; Ravens, J. R.; Pearce, L. A.; Odor, D. L.; Suzuki, K.: Progressive myoclonus epilepsy with Lafora inclusion bodies. I. Clinical, genetic, histopathologic and biochemical aspects. Arch. Neurol. 16: 565-582, 1967.
[7938] 2048. Lehesjoki, A.-E.; Koskiniemi, M.; Pandolfo, M.; Antonelli, A.; Kyllerman, M.; Wahlstrom, J.; Nergardh, A.; Burmeister, M.; Sistonen, P.; Norio, R.; de la Chapelle, A.: Linkage studies in progressive myoclonus epilepsy: Unverricht-Lundborg and Lafora's diseases. Neurology 42:1545-1550, 1992.
[7939] 2049. Maddox, L. O.; Descartes, M.; Collins, J.; Keating, J.; Rosenfeld, S.; Palmer, C.; Carroll, A. J.; Kuzniecky, R.: Identification of a recombination event narrowing the Lafora disease gene region. J. Med. Genet. 34: 590-591, 1997.
[7940] 2050. Solinas-Toldo, S.; Lengauer, C.; Fries, R.: Comparative genome map of human and cattle. Genomics 27: 489-496, 1995.
[7941] 2051. Olives, B.; Martial, S.; Mattei, M.-G.; Matassi, G.; Rousselet, G.; Ripoche, P.; Cartron, J.-P.; Bailly, P.: Molecular characterization of a new urea transporter in the human kidney. FEBS Lett. 386: 156-160, 1996.
[7942] 2052. Ranade, K.; Wu, K.-W.; Hwu, C.-M.; Ting, C.-T.; Pei, D.; Pesich, R.; Hebert, J.; Chen, Y.-D. I.; Pratt, R.; Olshen, R.; Masaki, K.; Risch, N.; Cox, D. R.; Botstein, D.: Genetic variation in the human urea transporter-2 is associated with variation in blood pressure. Hum. Molec. Genet. 10: 2157-2164, 2001.
[7943] 2053. Ansel, K. M.; Ngo, V. N.; Hyman, P. L.; Luther, S. A.; Forster, R.; Sedgwick, J. D.; Browning, J. L.; Lipp, M.; Cyster, J. G.: A chemokine-driven positive feedback loop organizes lymphoid follicles. Nature 406:309-314, 2000.
[7944] 2054. Petersen, S.; Casellas, R.; Reina-San-Martin, B.; Chen, H. T.; Difilippantonio, M. J.; Wilson, P. C.; Hanitsch, L.; Celeste, A.; Muramatsu, M.; Pilch, D. R.; Redon, C.; Ried, T.; Bonner, W. M.; Honjo, T.; Nussenzweig, M. C.; Nussenzweig, A.: AID is required to initiate Nbs1/gamma-H2AX focus formation and mutations at sites of class switching. Nature 414:660-665, 2001.
[7945] 2055. Morasso, M. I.; Yonescu, R.; Griffin, C. A.; Sargent, T. D.: Localization of human DLX8 to chromosome 17q21.3-q22 by fluorescence in situ hybridization. Mammalian Genome 8: 302-303, 1997.
[7946] 2056. Quinn, L. M.; Johnson, B. V.; Nicholl, J.; Sutherland, G. R.; Kalionis, B.: Isolation and identification of homeobox genes from the human placenta including a novel member of the Distal-less family, DLX4. Gene 187:55-61, 1997.
[7947] 2057. Bengtsson, E.; Neame, P. J.; Heinegard, D.; Sommarin, Y.: The primary structure of a basic leucine-rich repeat protein, PRELP, found in connective tissues. J. Biol. Chem. 270: 25639-25644, 1995.
[7948] 2058. Grover, J.; Chen, X.-N.; Korenberg, J. R.; Recklies, A. D.; Roughley, P. J.: The gene organization, chromosome location, and expression of a 55-kDa matrix protein (PRELP) of human articular cartilage. Genomics 38:109-117, 1996.
[7949] 2059. Blanco, P.; Sargent, C. A.; Boucher, C. A.; Mitchell, M.; Affara, N. A.: Conservation of PCDHX in mammals; expression of X/Y genes predominantly in brain. Mammalian Genome 11: 906-914, 2000.
[7950] 2060. Ciccodicola, A.; D'Esposito, M.; Esposito, T.; Gianfrancesco, F.; Migliaccio, C.; Miano, M. G.; Matarazzo, M. R.; Vacca, M.; Franze, A.; Cuccurese, M.; Cocchia, M.; Curci, A.; and 9 others: Differentially regulated and evolved genes in the fully sequenced Xq/Yq pseudoautosomal region. Hum. Molec. Genet. 9: 395-401, 2000.
[7951] 2061. Mumm, S.; Molini, B.; Terrell, J.; Srivastava, A.; Schlessinger, D.: Evolutionary features of the 4-Mb Xq21.3 XY homology region revealed by a map at 60-kb resolution. Genome Res. 7: 307-314, 1997.
[7952] 2062. Schwartz, A.; Chan, D. C.; Brown, L. G.; Alagappan, R.; Pettay, D.; Disteche, C.; McGillivray, B.; de la Chapelle, A.; Page, D. C.: Reconstructing hominid Y evolution: Xhomologous block, created by X-Y transposition, was disrupted by Yp inversion through LINE-LINE recombination. Hum. Molec. Genet. 7: 1-11, 1998.
[7953] 2063. Tilford, C. A.; Kuroda-Kawaguchi, T.; Skaletsky, H.; Rozen, S.; Brown, L. G.; Rosenberg, M.; McPherson, J. D.; Wylie, K.; Sekhon, M.; Kucaba, T. A.; Waterston, R. H.; Page, D. C.: A physical map of the human Y chromosome. Nature 409: 943-945, 2001.
[7954] 2064. Yoshida, K.; Sugano, S.: Identification of a novel protocadherin gene (PCDH11) on the human XY homology region in Xq21.3. Genomics 62:540-543, 1999.
[7955] 2065. Liu, Z.; Sun, C.; Olejniczak, E. T.; Meadows, R. P.; Betz, S. F.; Oost, T.; Herrmann, J.; Wu, J. C.; Fesik, S. W.: Structural basis for binding of Smac/DIABLO to the XIAP BIR3 domain. Nature 408:1004-1008, 2000.
[7956] 2066. Srinivasula, S. M.; Hegde, R.; Saleh, A.; Datta, P.; Shiozaki, E.; Chai, J.; Lee, R.-A.; Robbins, P. D.; Fernandes-Alnemri, T.; Shi, Y.; Alnemri, E. S.: A conserved XIAP-interaction motif in caspase-9 and Smac/DIABLO regulates caspase activity and apoptosis. Nature 410:112-116, 2001.
[7957] 2067. Bomont, P.; Cavalier, L.; Blondeau, F.; Ben Hamida, C.; Belal, S.; Tazir, M.; Demir, E.; Topaloglu, H.; Korinthenberg, R.; Tuysuz, B.; Landrieu, P.; Hentati, F.; Koenig, M.: The gene encoding gigaxonin, a new member of the cytoskeletal BTB/kelch repeat family, is mutated in giant axonal neuropathy. Nature Genet. 26: 370-374, 2000.
[7958] 2068. Treiber-Held, S.; Budjarjo-Welim, H.; Riemann, D.; Richter, J.; Kretzschmar, H. A.; Hanefeld, F.: Giant axonal neuropathy: a generalize ddisorder of intermediate filaments with longitudinal grooves in the hair. Neuropediatrics 25: 89-93, 1994.
   2069. Minassian, B. A.; Lee, J. R.; Herbrick, J.-A.; Huizenga, J.; Soder, S.; Mungall, A. J.; Dunham, I.; Gardner, R.; Fong, C. G.; Carpenter, S.; Jardim, L.; Satishchandra, P.; Andermann, E.; Snead, O. C., III; Lopes-Cendes, I.; Tsui, L.-C.; Delgado-Escueta, A. V.; Rouleau, G. A.; Scherer, S. W.: Mutations in a gene encoding a novel protein tyrosine phosphatase cause progressive myoclonus epilepsy. Nature Genet. 20: 171-174, 1998.
[7959] 2070. Norio, R.; Koskiniemi, M.: Progressive myoclonus epilepsy: genetic and nosological aspects with special reference to 107 Finnish patients. Clin. Genet. 15: 382-398, 1979.
[7960] 2071. Ortiz-Hidalgo, C.: The man behind Lafora's bodies. Am. J. Surg. Path. 10: 358-361, 1986.
[7961] 2072. Sainz, J.; Minassian, B. A.; Serratosa, J. M.; Gee, M. N.; Sakamoto, L. M.; Iranmanesh, R.; Bohlega, S.; Baumann, R. J.; Ryan, S.; Sparkes, R. S.; Delgado-Escueta, A. V.: Lafora progressive myoclonus epilepsy: narrowing the chromosome 6q24 locus by recombinations and homozygosities. (Letter) Am. J. Hum. Genet. 61: 1205-1209, 1997.
[7962] 2073. Sarlin, M. B.; Kloepfer, H. W.; Mickle, W. A.; Heath, R. G.: The detection of carriers in hereditary myoclonic epilepsy. Acta Genet. Med. Gemellol. 9: 466-471, 1960.
   2074. Schwarz, G. A.; Yanoff, M.: Lafora's disease, distinct clinico-pathologic form of Unverricht's syndrome. Arch. Neurol. 12: 172-188, 1965.
[7963] 2075. Serratosa, J. M.; Delgado-Escueta, A. V.; Posada, I.; Shih, S.; Drury, I.; Berciano, J.; Zabala, J. A.; Antunez, M. C.; Sparkes, R. S.: The gene for progressive myoclonus epilepsy of the Lafora type maps to chromosome 6q. Hum. Molec. Genet. 4: 1657-1663, 1995.
[7964] 2076. Serratosa, J. M.; Gomez-Garre, P.; Gallardo, M. E.; Anta, B.; Beltran-Valero de Bernabe, D.; Lindhout, D.; Augustijn, P. B.; Tassinari, C. A.; Michelucci, R.; Malafosse, A.; Topcu, M.; Grid, D.; Dravet, C.; Berkovic, S. F.; Rodriguez de Cordoba, S.: A novel protein tyrosine phosphatase gene is mutated in progressive myoclonus epilepsy of the Lafora type (EPM2). Hum. Molec. Genet. 8: 345-352, 1999.
[7965] 2077. Yanoff, M.; Schwarz, G. A.: Lafora's disease: a distinct genetically determined form of Unverricht's syndrome. Genet. Hum. 14: 235-244, 1965.
[7966] 2078. Yokoi, S.; Austin, J.; Witmer, F.; Sakai, M.: Studies in myoclonus epilepsy (Lafora body forms). I. Isolation and preliminary characterization of Lafora bodies in two cases. Arch. Neurol. 19: 15-33, 1968.
[7967] 2079. Carney, J. P.; Maser, R. S.; Olivares, H.; Davis, E. M.; Le Beau, M.; Yates, J. R., III; Hays, L.; Morgan, W. F.; Petrini, J. H. J.: The hMre11/hRad50 protein complex and Nijmegen breakage syndrome: linkage of double-strand break repair to the cellular DNA damage response. Cell 93:477-486, 1998.
[7968] 2080. Chang, S. C.; Hoang, B.; Thomas, J. T.; Vukicevic, S.; Luyten, F. P.; Ryba, N. J. P.; Kozak, C. A.; Reddi, A. H.; Moos, M., Jr.: Cartilage-derived morphogenetic proteins: new members of the transforming growth factor-beta superfamily predominantly expressed in long bones during human embryonic development. J. Biol. Chem. 269: 28227-28234, 1994.
[7969] 2081. Faiyaz-UI-Haque, M.; Ahmad, W.; Wahab, A.; Haque, S.; Azim, A. C.; Zaidi, S. H. E.; Teebi, A. S.; Ahmad, M.; Cohn, D. H.; Siddique, T.; Tsui, L.-C.: Frameshift mutation in the cartilage-derived morphogenetic protein 1 (CDMP1) gene and severe acromesomelic chondrodysplasia resembling Grebe-type chondrodysplasia. Am. J. Med. Genet. 111: 31-37, 2002.
[7970] 2082. Rousseau-Merck, M.-F.; Duro, D.; Berger, R.; Thiesen, H. J.: Chromosomal localization of two KOX zinc finger genes on chromosome bands 7q21-q22. Ann. Genet. 38: 81-84, 1995.
   2083. Tommerup, N.; Vissing, H.: Isolation and fine mapping of 16 novel human zinc finger-encoding cDNAs identify putative candidate genes for developmental and malignant disorders. Genomics 27: 259-264, 1995.
[7971] 2084. Boring, L.; Gosling, J.; Cleary, M.; Charo, I. F.: Decreased lesion formation in CCR2 −/− mice reveals a role for chemokines in the initiation of atherosclerosis. Nature 394: 894-897, 1998.
[7972] 2085. Charo, I. F.; Myers, S. J.; Herman, A.; Franci, C.; Connolly, A. J.; Coughlin, S. R.: Molecular cloning and functional expression of two monocyte chemoattractant protein 1 receptors reveals alternative splicing of the carboxyl-terminal tails. Proc. Nat. Acad. Sci. 91:2752-2756, 1994.
[7973] 2086. Chang, C.; da Silva, S. L.; Ideta, R.; Lee, Y.; Yeh, S.; Burbach, J. P. H.: Human and rat TR4 orphan receptors specify a subclass of the steroid receptor superfamily. Proc. Nat. Acad. Sci. 91: 6040-6044, 1994.
[7974] 2087. Chang, C.; Kokontis, J.; Acakpo-Satchivi, L.; Liao, S.; Takeda, H.; Chang, Y.: Molecular cloning of new human TR2 receptors: a class of steroid receptor with multiple ligand-binding domains. Biochem. Biophys. Res. Commun. 165: 735-741, 1989.
   2088. Hirose, T.; Fujimoto, W.; Yamaai, T.; Kim, K. H.; Matsuura, H.; Jetten, A. M.: TAK1: Molecular cloning and characterization of anew member of the nuclear receptor superfamily. Molec. Endocr. 1667-1680, 1994.
[7975] 2089. Yoshikawa, T.; DuPont, B. R.; Leach, R. J.; Detera-Wadleigh, S. D.: New variants of the human and rat nuclear hormone receptor, TR4: expression and chromosomal localization of the human gene. Genomics 35:361-366, 1996.
[7976] 2090. Choe, H.; Farzan, M.; Sun, Y.; Sullivan, N.; Rollins, B.; Ponath, P. D.; Wu, L.; Mackay, C. R.; LaRosa, G.; Newman, W.; Gerard, N.; Gerard, C.; Sodroski, J.: The betachemokine receptors CCR3 and CCR5 facilitate infection by primary HIV-1 isolates. Cell 85: 1135-1148, 1996.
[7977] 2091. Kim, B.-T.; Kitagawa, H.; Tamura, J.; Saito, T.; Kusche-Gullberg, M.; Lindahl, U.; Sugahara, K.: Human tumor suppressor EXT gene family members EXTL1 and EXTL3 encode alpha-1,4-N-acetylglucosaminyl transferases that likely are involved in heparan sulfate/heparin biosynthesis. Proc. Nat. Acad. Sci. 98: 7176-7181, 2001.
[7978] 2092. Wise, C. A.; Clines, G. A.; Massa, H.; Trask, B. J.; Lovett, M.: Identification and localization of the gene for EXTL, a third member of the multiple exostoses gene family. Genome Res. 7: 10-16, 1997.
[7979] 2093. Kobayashi, S.; Uemura, H.; Kohda, T.; Nagai, T.; Chinen, Y.; Naritomi, K.; Kinoshita, E.; Ohashi, H.; Imaizumi, K.; Tsukahara, M.; Sugio, Y.; Tonoki, H.; Kishino, T.; Tanaka, T.; Yamada, M.; Tsutsumi, O.; Niikawa, N.; Kaneko-Ishino, T.; Ishino, F.: No evidence of PEG1/MEST gene mutations in Silver-Russell syndrome patients. Am. J. Med. Genet. 104:225-231, 2001.
[7980] 2094. Bosher, J. M.; Williams, T.; Hurst, H. C.: The developmentally regulated transcription factor AP-2 is involved in c-erbB-2 overexpression in human mammary carcinoma. Proc. Nat. Acad. Sci. 92: 744-747, 1995.
[7981] 2095. Combadiere, C.; Ahuja, S. K.; Murphy, P. M.: Cloning, chromosomal localization, and RNA expression of a human beta chemokine receptor-like gene. DNA Cell Biol. 14: 673-680, 1995.
[7982] 2096. Combadiere, C.; Ahuja, S. K.; Van Damme, J.; Tiffany, H. L.; Gao, J.-L.; Murphy, P. M.: Monocyte chemoattractant protein-3 is a functional ligand for CC chemokine receptors 1 and 2B. J. Biol. Chem. 270:29671-29675, 1995.
[7983] 2097. Doranz, B. J.; Rucker, J.; Yi, Y.; Smyth, R. J.; Samson, M.; Peiper, S. C.; Parmentier, M.; Collman, R. G.; Doms, R. W.: A dual-tropic primary HIV-1 isolate that uses fusin and the beta-chemokine receptors CKR-5, CKR-3, and CKR-2b as fusion cofactors. Cell 85: 1149-1158, 1996.
[7984] 2098. Mummidi, S.; Ahuja, S. S.; Gonzalez, E.; Anderson, S. A.; Santiago, E. N.; Stephan, K. T.; Craig, F. E.; O'Connell, P.; Tryon, V.; Clark, R. A.; Dolan, M. J.; Ahuja, S. K.: Genealogy of the CCR5 locus and chemokine system gene variants associated with altered rates of HIV-1 disease progression. Nature Med. 4: 786-793, 1998.
[7985] 2099. Peters, W.; Dupuis, M.; Charo, I. F.: A mechanism for the impaired IFN-gamma production in C-C chemokine receptor 2 (CCR2) knockout mice: role of CCR2 in linking the innate and adaptive immune responses. J. Immun. 165: 7072-7077, 2000.
[7986] 2100. Peters, W.; Scott, H. M.; Chambers, H. F.; Flynn J. L.; Charo, I. F.; Ernst, J. D.: Chemokine receptor 2 serves an early and essential role in resistance to Mycobacterium tuberculosis. Proc. Nat. Acad. Sci. 98: 7958-7963, 2001.
[7987] 2101. Samson, M.; Labbe, O.; Mollereau, C.; Vassart, G.; Parmentier, M.: Molecular cloning and functional expression of a new human CC-chemokine receptor gene. Biochemistry 35: 3362-3367, 1996.
[7988] 2102. Samson, M.; Soularue, P.; Vassart, G.; Parmentier, M.: The genes encoding the human CC-chemokine receptors CC-CKR1 to CC-CKR5 (CMKBR1-CMKBR5) are clustered in the p21.3-p24 region of chromosome 3. Genomics 36:522-526, 1996.
[7989] 2103. Sanders, S. K.; Crean, S. M.; Boxer, P. A.; Kellner, D.; LaRosa, G. J.; Hunt, S. W., III.: Functional differences between monocytechemotactic protein-1 receptor A and monocyte chemotactic protein-1 receptor B expressed in a Jurkat T cell. J. Immun. 165: 4877-4883, 2000.
[7990] 2104. Smith, M. W.; Dean, M.; Carrington, M.; Winkler, C.; Huttley, G. A.; Lomb, D. A.; Goedert, J. J.; O'Brien, T. R.; Jacobson, L. P.; Kaslow, R.; Buchbinder, S.; Vittinghoff, E.; Vlahov, D.; Hoots, K.; Hilgartner, M. W.; Hemophilia Growth and Development Study (HGDS); Multicenter AIDS Cohort Study (MACS); Multicenter Hemophilia Cohort Study (MHCS); San Francisco City Cohort (SFCC); ALIVE Study; O'Brien, S. J.: Contrasting genetic influence of CCR2 and CCR5 variants on HIV-1 infection and disease progression. Science 277: 959-965, 1997.
[7991] 2105. Wong, L.-M.; Myers, S. J.; Tsou, C.-L.; Gosling, J.; Arai, H.; Charo, I. F.: Organization and differential expression of the human monocyte chemoattractant protein 1 receptor gene: evidence for the role of the carboxyl-terminal tail in receptor trafficking. J. Biol. Chem. 272: 1038-1045, 1997.
[7992] 2106. Donald, L. J.; Wang, H. S.; Hamerton, J. L.: Assignment of the gene for cystathionase (CYS) to human chromosome 16. (Abstract) Cytogenet. Cell Genet. 32: 268 only, 1982.
[7993] 2107. Frimpter, G. W.: Cystathioninuria: nature of the defect. Science 149:1095-1096, 1965.
[7994] 2108. Frimpter, G. W.: Cystathioninuria, sulfite oxidase deficiency, and ‘beta-mercaptolactate-cysteine disulfiduria. In: Stanbury, J. B.; Wyngaarden, J. B.; Fredrickson, D. S.: The Metabolic Basis of Inherited Disease. New York: McGraw-Hill (pub.) (3rd ed.): 1972. Pp. 413-425.
[7995] 2109. Frimpter, G. W.; Haymovitz, A.; Hor with, M.: Cystathioninuria. New Eng. J. Med. 268: 333-339, 1963.
[7996] 2110. Harris, H.; Penrose, L. S.; Thomas, D. H. H.: Cystathioninuria. Ann. Hum. Genet. 23: 442-453, 1959.
[7997] 2111. Lu, Y.; O'Dowd, B. F.; Orrego, H.; Israel, Y.: Cloning and nucleotide sequence of human liver cDNA encoding for cystathionine gamma-lyase. Biochem. Biophys. Res. Commun. 189: 749-758, 1992.
[7998] 2112. Lyon, I. C. T.; Procopis, P. G.; Turner, B.: Cystathioninuriain a well baby population. Acta Paediat. Scand. 60: 324-328, 1971.
[7999] 2113. Mongeau, J.-G.; Hilgartner, M.; Worthen, H. G.; Frimpter, G. W.: Cystathioninuria: study of an infant with normal mentality, thrombocytopenia, and renal calculi. J. Pediat. 69: 1113-1120, 1967.
[8000] 2114. Pascal, T. A.; Gaull, G. E.; Beratis, N. G.; Gillam, B. M.; Tallan, H. H.: Cystathionase deficiency: evidence for genetic heterogeneity in primary cystathioninuria. Pediat. Res. 12: 125-133, 1978.
[8001] 2115. Perry, T. L.; Hardwick, D. F.; Hansen, S.; Love, D. L.; Israels, S.: Cystathioninuria in two healthy siblings. New Eng. J. Med. 278:590-592, 1968.
[8002] 2116. Schneiderman, L. J.: Latent cystathioninuria. J. Med. Genet. 4:260-263, 1967.
[8003] 2117. Scott, C. R.; Dassell, S. W.; Clark, S. H.; Chiang-Teng, C.; Swedberg, K. R.: Cystathioninemia: a benign genetic condition. J. Pediat. 76:571-577, 1970.
[8004] 2118. Shaw, K. N. F.; Lieberman, E.; Koch, R.; Donnell, G. N.: Cystathioninuria. Am. J. Dis. Child. 113: 119-128, 1967.
[8005] 2119. Tada, K.; Yoshida, T.; Yokoyama, Y.; Sato, T.; Nakagawa, H.; Arakawa, T.: Cystathioninuria not associated with vitamin B6 dependency: a probably new type of cystathioninuria. Tohoku J. Exp. Med. 95: 235-242, 1968.
[8006] 2120. Whelan, D. T.; Scriver, C. R.: Cystathioninuria and renal iminoglycinuriain a pedigree: a perspective on counseling. New Eng. J. Med. 278:924-927, 1968.
[8007] 2121. Nagase, T.; Seki, N.; Ishikawa, K.; Ohira, M.; Kawarabayasi, Y.; Ohara, O.; Tanaka, A.; Kotani, H.; Miyajima, N.; Nomura, N.: Prediction of the coding sequences of unidentified human genes. VI. The coding sequences of 80 new genes (KIAA0201-KIAA0280) deduced by analysis of cDNA clones from cell line KG-1 and brain. DNA Res. 3: 321-329, 1996.
[8008] 2122. Connelly, M. A.; Grady, R. C.; Mushinski, J. F.; Marcu, K. B.: PANG, a gene encoding a neuronal glycoprotein, is ectopically activated by intracisternal A-type particle long terminal repeats in murine plasmacytomas. Proc. Nat. Acad. Sci. 91: 1337-1341, 1994.
[8009] 2123. Mock, B. A.; Connelly, M. A.; McBride, O. W.; Kozak, C. A.; Marcu, K. B.: Plasmacytoma-associated neuronal glycoprotein, Pang, maps to mouse chromosome 6 and human chromosome 3. Genomics 34: 226-228, 1996.
[8010] 2124. Cheung, A. H.; Stewart, R. J.; Marsden, P. A.: Endothelial Tie2/Tekligands angiopoietin-1 (ANGPT1) and angiopoietin-2 (ANGPT2): regionallocalization of the human genes to 8q22.3-q23 and 8p23. Genomics 48:389-391, 1998.
[8011] 2125. Davis, S.; Aldrich, T. H.; Jones, P. F.; Acheson, A.; Compton, D. L.; Jain, V.; Ryan, T. E.; Bruno, J.; Radziejewski, C.; Maisonpierre, P. C.; Yancopoulos, G. D.: Isolation of angiopoietin-1, a ligand for the TIE2 receptor, by secretion-trap expression cloning. Cell 87:1161-1169, 1996.
[8012] 2126. Folkman, J.; D'Amore, P. A.: Blood vessel formation: what is its molecular basis? Cell 87: 1153-1155, 1996.
[8013] 2127. Marziliano, N.; Crovella, S.; Audero, E.; Pecile, V.; Bussolino, F.; Amoroso, A.; Garagna, S.: Genetic mapping of the mouse homologue of the human angiopoietin-1 gene (Agpt) to mouse chromosome 9E2 byin situ hybridization. Cytogenet. Cell Genet. 87: 199-200, 1999.
[8014] 2128. Sato, T. N.; Tozawa, Y.; Deutsch, U.; Wolburg-Buchholz, K.; Fujiwara, Y.; Gendron-Maguire, M.; Gridley, T.; Wolburg, H.; Risau, W.; Qin, Y.: Distinct roles of the receptor tyrosine kinases Tie-1 and Tie-2 in blood vessel formation. Nature 376: 70-73, 1995.
[8015] 2129. Suri, C.; Jones, P. F.; Patan, S.; Bartunkova, S.; Maisonpierre, P. C.; Davis, S.; Sato, T. N.; Yancopoulos, G. D.: Requisite role of angiopoietin-1, a ligand for the TIE2 receptor, during embryonic angiogenesis. Cell 87: 1171-1180, 1996.
[8016] 2130. Suri, C.; McClain, J.; Thurston, G.; McDonald, D. M.; Zhou, H.; Oldmixon, E. H.; Sato, T. N.; Yancopoulos, G. D.: Increased vascularization in mice overexpressing angiopoietin-1. Science 282: 468-471, 1998.
[8017] 2131. Valenzuela, D. M.; Griffiths, J. A.; Rojas, J.; Aldrich, T. H.; Jones, P. F.; Zhou, H.; McClain, J.; Copeland, N. G.; Gilbert, D. J.; Jenkins, N. A.; Huang, T.; Papadopoulos, N.; Maisonpierre, P. C.; Davis, S.; Yancopoulos, G. D.: Angiopoietins 3 and 4: diverging gene counterparts in mice and humans. Proc. Nat. Acad. Sci. 96:1904-1909, 1999.
[8018] 2132. Nakanishi-Matsui, M.; Zheng, Y.-W.; Sulciner, D. J.; Weiss, E. J.; Ludeman, M. J.; Coughlin, S. R.: PAR3 is a cofactor for PAR4 activation by thrombin. Nature 404: 609-613, 2000.
[8019] 2133. Sambrano, G. R.; Weiss, E. J.; Zheng, Y.-W.; Huang, W.; Coughlin, S. R.: Role of thrombin signalling in platelets in haemostasis and thrombosis. Nature 413: 74-78, 2001.
[8020] 2134. Faiyaz-UI-Haque, M.; Ahmad, W.; Zaidi, S. H. E.; Haque, S.; Teebi, A. S.; Ahmad, M.; Cohn, D. H.; Tsui, L. C.: Mutation in the cartilage-derived morphogenetic protein-1 (CDMP1) gene in a kindred affected with fibular hypoplasia and complex brachydactyly (DuPan syndrome). Clin. Genet. 61:454-458, 2002.
[8021] 2135. Shapiro, M. B.; Senapathy, P.: RNA splice junctions of different classes of eukaryotes: sequence statistics and functional implications in gene expression. Nucleic Acids Res. 15: 7155-7174, 1987.
[8022] 2136. Ishikawa, K.; Nagase, T.; Suyama, M.; Miyajima, N.; Tanaka, A.; Kotani, H.; Nomura, N.; Ohara, O.: Prediction of the coding sequences of unidentified human genes. X. The complete sequences of 100 new cDNA clones from brain which can code for large proteins in vitro. DNA Res. 5: 169-176, 1998.
[8023] 2137. Kipreos, E. T.; Lander, L. E.; Wing, J. P.; He, W. W.; Hedgecock, E. M.: cul-1 is required for cell cycle exit in C. elegans and identifies a novel gene family. Cell 85: 829-839, 1996.
[8024] 2138. Daugherty, B. L.; Springer, M. S.: The betachemokine receptorgenes CCR1 (CMKBR1), CCR2 (CMKBR2), and CCR3 (CMKBR3) cluster within 285 kb on human chromosome 3p21. Genomics 41: 294-295, 1997.
[8025] 2139. Ferbus, D.; Le Chalony, C.; Prosperi, M.-T.; Muleris, M.; Vincent-Salomon, A.; Goubin, G.: Identification, nuclear localization, and binding activities of OZF, a human protein solely composed of zinc finger motifs. Europ. J. Biochem. 236: 991-995, 1996.
[8026] 2140. Le Chalony, C.; Apiou, F.; Pibouin, L.; Dutrillaux, B.; Goubin, G.: Constitutive amplification of a zinc finger protein gene in cattle. DNA Cell Biol. 15: 83-88, 1996.
[8027] 2141. Le Chalony, C.; Prosperi, M.-T.; Haluza, R.; Apiou, F.; Dutrillaux, B.; Goubin, G.: The OZF gene encodes a protein consisting essentially of zinc-finger motifs. J. Molec. Biol. 236: 399-404, 1994.
[8028] 2142. Dhar, S. K.; Yoshida, K.; Machida, Y.; Khaira, P.; Chaudhuri, B.; Wohlschlegel, J. A.; Leffak, M.; Yates, J.; Dutta, A.: Replication from oriP of Epstein-Barr virus requires human ORC and is inhibited by geminin. Cell 106: 287-296, 2001.
[8029] 2143. Gavin, K. A.; Hidaka, M.; Stillman, B.: Conserved initiator proteins in eukaryotes. Science 270: 1667-1671, 1995.
[8030] 2144. Ohtani, K.; DeGregori, J.; Leone, G.; Herendeen, D. R.; Kelly, T. J.; Nevins, J. R.: Expression of the HsOrcl gene, a human ORC1 homolog, is regulated by cell proliferation via the E2F transcription factor. Molec. Cell. Biol. 16: 6977-6984, 1996.
[8031] 2145. Takahara, K.; Bong, M.; Brevard, R.; Eddy, R. L.; Haley, L. L.; Sait, S. J.; Shows, T. B.; Hoffman, G. G.; Greenspan, D. S.: Mouse and human homologues of the yeast origin of replication recognition complex subunit ORC2 and chromosomal localization of the cognate human gene ORC2L. Genomics 31: 119-122, 1996.
[8032] 2146. Rowen, L.; Young, J.; Birditt, B.; Kaur, A.; Madan, A.; Philipps, D. L.; Qin, S.; Minx, P.; Wilson, R. K.; Hood, L.; Graveley, B. R.: Analysis of the human neurexin genes: alternative splicing and the generation of protein diversity. Genomics 79: 587-597, 2002.
[8033] 2147. Tabuchi, K.; Sudhof, T. C.: Structure and evolution of neurexingenes: insight into the mechanism of alternative splicing. Genomics 79:849-859, 2002.
[8034] 2148. Ullrich, B.; Ushkaryov, Y. A.; Sudhof, T. C.: Cartography of neurexins: more than 1000 isoforms generated by alternative splicing and expressed in distinct subsets of neurons. Neuron 14: 497-507, 1995.
[8035] 2149. Ushkaryov, Y. A.; Petrenko, A. G.; Geppert, M.; Sudhof, T. C.: Neurexins: synaptic cell surface proteins related to the alpha-I atrotoxin receptor and laminin. Science 257: 50-56, 1992.
[8036] 2150. Scheiffele, P.; Fan, J.; Choih, J.; Fetter, R.; Serafini, T.: Neuroligin expressed in nonneuronal cells triggers presynaptic development in contacting axons. Cell 101: 657-669, 2000.
[8037] 2151. Cavaloc, Y.; Popielarz, M.; Fuchs, J.-P.; Gattoni, R.; Stevenin, J.: Characterization and cloning of the human splicing factor 9G8: a novel 35 kDa factor of the serine/arginine protein family. EMBO J. 13: 2639-2649, 1994.
[8038] 2152. Popielarz, M.; Cavaloc, Y.; Mattei, M.-G.; Gattoni, R.; Stevenin, J.: The gene encoding human splicing factor 9G8: structure, chromosomal localization, and expression of alternatively processed transcripts. J. Biol. Chem. 270: 17830-17835, 1995.
[8039] 2153. Wu, Q.; Zhang, T.; Cheng, J.-F.; Kim, Y.; Grimwood, J.; Schmutz, J.; Dickson, M.; Noonan, J. P.; Zhang, M. Q.; Myers, R. M.; Maniatis, T.: Comparative DNA sequence analysis of mouse and human protocadherin gene clusters. Genome Res. 11: 389-404, 2001.
[8040] 2154. Aoki, K.; Inazawa, J.; Takahashi, T.; Nakahara, K.; Kasai, M.: Genomic structure and chromosomal localization of the gene encoding translin, a recombination hotspot binding protein. Genomics 43:237-241, 1997.
[8041] 2155. Aoki, K.; Nakahara, K.; Ikegawa, C.; Seto, M.; Takahashi, T.; Minowada, J.; Strominger, J. L.; Maziarz, R. T.; Kasai, M.: Nuclear proteins binding to a novel target sequence within the recombination hotspotregions of Bcl-2 and the immunoglobulin D(H) gene family. Oncogene 9:1109-1115, 1994.
[8042] 2156. Bodzioch, M.; Orso, E.; Klucken, J.; Langmann, T.; Bottcher, A.; Diederich, W.; Drobnik, W.; Barlage, S.; Buchler, C.; Porsch-Ozcurumez, M.; Kaminski, W. E.; Hahmann, H. W.; Oette, K.; Rothe, G.; Aslanidis, C.; Lackner, K. J.; Schmitz, G.: The gene encoding ATP-binding cassette-transporter 1 is mutated in Tangier disease. Nature Genet. 22: 347-351, 1999.
[8043] 2157. Brooks-Wilson, A.; Marcil, M.; Clee, S. M.; Zhang, L.-H.; Roomp, K.; van Dam, M.; Yu, L.; Brewer, C.; Collins, J. A.; Molhuizen, H. O. F.; Loubser, O.; Ouelette, B. F. F.; and 14 others: Mutations in ABC1 in Tangier disease and familial high-density lipoprotein deficiency. Nature Genet. 22: 336-345, 1999.
[8044] 2158. Remaley, A. T.; Rust, S.; Rosier, M.; Knapper, C.; Naudin, L.; Broccardo, C.; Peterson, K. M.; Koch, C.; Arnould, I.; Prades, C.; Duverger, N.; Funke, H.; Assman, G.; Dinger, M.; Dean, M.; Chimini, G.; Santamarina-Fojo, S.; Fredrickson, D. S.; Denefle, P. Brewer, H. B., Jr.: Human ATP-binding cassette transporter 1 (ABC1): genomic organization and identification of the genetic defect in the original Tangier disease kindred. Proc. Nat. Acad. Sci. 96: 12685-12690, 1999.
[8045] 2159. Rust, S.; Rosier, M.; Funke, H.; Real, J.; Amoura, Z.; Piette, J.-C.; Deleuze, J.-F.; Brewer, H. B.; Duverger, N.; Denefle, P.; Assmann, G.: Tangier disease is caused by mutations in the gene encoding ATP-binding cassette transporter 1. Nature Genet. 22: 352-355, 1999.
[8046] 2160. Young, S. G.; Fielding, C. J.: The ABCs of cholesterol efflux. Nature Genet. 22: 316-318, 1999.
[8047] 2161. Delpire, E.; Lu, J.; England, R.; Dull, C.; Thorne, T.: Deafness and imbalance associated within activation of the secretory Na—K-2Clco-transporter. Nature Genet. 22: 192-195, 1999.
[8048] 2162. Evans, R. L.; Park, K.; Turner, R. J.; Watson, G. E.; Nguyen, H.-V.; Dennett, M. R.; Hand, A. R.; Flagella, M.; Shull, G. E.; Melvin, J. E.: Severe impairment of salivation in Na+/K+/2Cl− cotransporter (NKCC1)-deficient mice. J. Biol. Chem. 275: 26720-26726, 2000.
[8049] 2163. Payne, J. A.; Xu, J.-C.; Haas, M.; Lytle, C. Y.; Ward, D.; Forbush, B., III: Primary structure, functional expression, and chromosomal localization of the bumetanide-sensitive Na—K—Cl cotransporter inhuman colon. J. Biol. Chem. 270: 17977-17985, 1995.
[8050] 2164. Quaggin, S. E.; Payne, J. A.; Forbush, B., III; Igarashi, P.: Localization of the renal Na—K—Cl cotransporter gene (Slc12a1) on mouse chromosome 2. Mammalian Genome 6: 557-561, 1995.
[8051] 2165. Xu, J.-C.; Lytle, C.; Zhu, T. T.; Payne, J. A.; Benz, E., Jr.; Forbush, B., III: Molecular cloning and functional expression of the bumetanide-sensitive Na—K—Cl cotransporter. Proc. Nat. Acad. Sci. 91: 2201-2205, 1994.
[8052] 2166. Sedlacek, Z.; Konecki, D. S.; Korn, B.; Klauck, S. M.; Poustka, A.: Evolutionary conservation and genomic organization of XAP-4, an Xq28 located gene coding for a human rab GDP-dissociation inhibitor (GDI). Mammalian Genome 5: 633-639, 1995.
[8053] 2167. Sedlacek, Z.; Munstermann, E.; Mincheva, A.; Lichter, P.; Poustka, A.: The human rab GDI beta gene with long retroposon-rich introns maps to 10p15 and its pseudo-gene to 7p11-p13. Mammalian Genome 9:78-80, 1998.
[8054] 2168. Cheng, Y.; Austin, S. C.; Rocca, B.; Koller, B. H.; Coffman, T. M.; Grosser, T.; Lawson, J. A.; FitzGerald, G. A.: Role of prostacyclinin the cardiovascular response to thromboxane A2. Science 296: 539-541, 2002.
[8055] 2169. Ueno, S.; Maruki, Y.; Nakamura, M.; Tomemori, Y.; Kamae, K.; Tanabe, H.; Yamashita, Y.; Matsuda, S.; Kaneko, S.; Sano, A.: The gene encoding a newly discovered protein, chorein, is mutated in chorea-acanthocytosis. Nature Genet. 28: 121-122, 2001.
[8056] 2170. Leone, G.; Sears, R.; Huang, E.; Rempel, R.; Nuckolls, F.; Park, C.-H.; Giangrande, P.; Wu, L.; Saavedra, H. I.; Field, S. J.; Thompson, M. A.; Yang, H.; Fujiwara, Y.; Greenberg, M. E.; Orkin, S.; Smith, C.; Nevins, J. R.: Myc requires distinct E2F activities to induce S phase and apoptosis. Molec. Cell 8: 105-113, 2001.
[8057] 2171. Cheng, S. Y.; Gong, Q. H.; Parkinson, C.; Robinson, E. A.; Appella, E.; Merlino, G. T.; Pastan, I.: The nucleotide sequence of a human cellular thyroid hormone-binding protein present in endoplasmic reticulum. J. Biol. Chem. 262: 11221-11227, 1987.
[8058] 2172. Koivu, J.; Myllyla, R.; Halaakoski, T.; Pihlajaniemi, T.; Tasanen, K.; Kivirikko, K. I.: A single polypeptide acts both as the beta subunit of prolyl 4-hydroxylase and as a protein disulfide-isomerase. J. Biol. Chem. 262: 6447-6449, 1987.
[8059] 2173. Morris, J. I.; Varandani, P. T.: Characterization of a cDNA for human glutathione-insulin transhydrogenase (protein-disulfide isomerase/oxidoreductase). Biochim. Biophys. Acta 949: 169-180, 1988.
[8060] 2174. Noiva, R.; Lennarz, W. J.: Protein disulfide isomerase: a multifunctional protein resident in the lumen of the endoplasmic reticulum. J. Biol. Chem. 267: 3553-3556, 1992.
[8061] 2175. Pajunen, L.; Hoyhtya, M.; Tryggvason, K.; Kivirikko, K. I.; Myllyla, R.: Species-specific antibodies in the assignment of the gene for the beta-subunit of human prolyl 4-hydroxylase. (Abstract) Cytogenet. Cell Genet. 40: 719 only, 1985.
[8062] 2176. Pajunen, L.; Jones, T. A.; Goddard, A.; Sheer, D.; Solomon, E.; Pihlajaniemi, T.; Kivirikko, K. I.: Regional assignment of the human gene coding for a multifunctional polypeptide (P4HB) acting as the beta-subunit of prolyl 4-hydroxylase and the enzyme protein disulfide isomerase to 17q25. Cytogenet. Cell Genet. 56: 165-168, 1991.
[8063] 2177. Pajunen, L.; Myllyla, R.; Helaakoski, T.; Pihlajaniemi, T.; Tasanen, K.; Hoyhtya, M.; Tryggvason, K.; Solomon, E.; Kivirikko, K. I.: Assignment of the gene coding for both the beta-subunit of prolyl 4-hydroxylase and protein disulphide isomerase to human chromosome region 17q23-25. (Abstract) Cytogenet. Cell Genet. 46: 674 only, 1987.
[8064] 2178. Pajunen, L.; Myllyla, R.; Helaakoski, T.; Pihlajaniemi, T.; Tasanen, K.; Hoyhtya, M.; Tryggvason, K.; Solomon, E.; Kivirikko, K. I.: Assignment of the gene coding for both the beta-subunit of prolyl 4-hydroxylase and the enzyme disulfide isomerase to human chromosome region 17p11-qter. Cytogenet. Cell Genet. 47: 37-41, 1988.
[8065] 2179. Pihlajaniemi, T.; Helaakoski, T.; Tasanen, K.; Myllyla, R.; Huhtala, M.-L.; Koivu, J.; Kivirikko, K. I.: Molecular cloning of the beta-subunit of human prolyl 4-hydroxylase: this subunit and protein disulphide isomerase are products of the same gene. EMBO J. 6: 643-649, 1987.
[8066] 2180. Popescu, N. C.; Cheng, S.; Pastan, I.: Chromosomal localization of the gene for a human thyroid hormone-binding protein. Am. J. Hum. Genet. 42: 560-564, 1988.
[8067] 2181. Tasanen, K.; Parkkonen, T.; Chow, L. T.; Kivirikko, K. I.; Pihlajaniemi, T.: Characterization of the human gene for a polypeptide that acts both as the beta-subunit of prolyl 4-hydroxylase and as protein disulfide isomerase. J. Biol. Chem. 263: 16218-16224, 1988.
[8068] 2182. Kelly, A.; Powis, S. H.; Glynne, R.; Radley, E.; Beck, S.; Trowsdale, J.: Second proteasome-related gene in the human MHC class II region. Nature 353:667-668, 1991.
[8069] 2183. Martinez, C. K.; Monaco, J. J.: Homology of proteasome subunits to a major histocompatibility complex-linked LMP gene. Nature 353:664-667, 1991.
[8070] 2184. Petes, T. D.: Meiotic recombination hot spots and cold spots. Nature Rev. Genet. 2: 360-369, 2001.
[8071] 2185. Van Kaer, L.; Ashton-Rickardt, P. G.; Eichelberger, M.; Gaczynska, M.; Nagashima, K.; Rock, K. L.; Goldberg, A. L.; Doherty, P. C.; Tonegawa, S.: Altered peptidase and viral-specific T cell response in LMP2 mutant mice. Immunity 1: 533-541, 1994.
[8072] 2186. Zhou, P.; Zanelli, E.; Smart, M.; David, C.: Genomic organization and tissue expression of mouse proteasome gene Lmp-2. Genomics 16:664-668, 1993.
[8073] 2187. Doolittle, R. F.; Hunkapiller, M. W.; Hood, L. E.; Devare, S. G.; Robbins, K. C.; Aaronson, S. A.; Antoniades, H. N.: Simian sarcomavirus onc gene, v-sis, is derived from the gene (or genes) encodinga platelet-derived growth factor. Science 221: 275-277, 1983.
[8074] 2188. Gardner, T. L.; Elston, D. M.; Wotowic, P. J.: A familial dermatofibrosarcomaprotuberans. J. Am. Acad. Derm. 39: 504-505, 1998.
[8075] 2189. Groffen, J.; Heisterkamp, N.; Stephenson, J. R.; Geurts van Kessel, A.; de Klein, A.; Grosveld, G.; Bootsma, D.: c-sis is translocated from chromosome 22 to chromosome 9 in chronic myelocytic leukemia. J. Exp. Med. 158: 9-15, 1983.
[8076] 2190. Hermansson, M.; Nister, M.; Betsholtz, C.; Heldin, C.-H.; Westermark, B.; Funa, K.: Endothelial cell hyperplasia in human glioblastoma: coexpression of mRNA for platelet-derived growth factor (PDGF) B chain and PDGF receptor suggests autocrine growth stimulation. Proc. Nat. Acad. Sci. 85: 7748-7752, 1988.
[8077] 2191. Josephs, S. F.; Dalla-Favera, R.; Gelmann, E. P.; Gallo, R. C.; Wong-Staal, F.: 5-prime viral and human cellular sequences corresponding to the transforming gene of simian sarcoma virus. Science 219: 503-505, 1983.
[8078] 2192. Josephs, S. F.; Guo, C.; Ratner, L.; Wong-Staal, F.: Human proto-oncogene nucleotide sequences corresponding to the transforming region of simiansarcoma virus. Science 223: 487-491, 1984.
[8079] 2193. Josephs, S. F.; Ratner, L.; Clarke, M. F.; Westin, E. H.; Reitz, M. S.; Wong-Staal, F.: Transforming potential of human c-sis nucleotide sequences encoding platelet-derived growth factor. Science 225:636-639, 1984.
[8080] 2194. Kelly, J. D.; Raines, E. W.; Ross, R.; Murray, M. J.: The B chain of PDGF alone is sufficient for mitogenesis. EMBO J. 4: 3399-3405, 1985.
[8081] 2195. Kiuru-Kuhlefelt, S.; El-Rifai, W.; Fanburg-Smith, J.; Kere, J.; Miettinen, M.; Knuutila, S.: Concomitant DNA copy number amplification at 17q and 22q in dermatofibrosarcoma protuberans. Cytogenet. Cell Genet. 92: 192-195, 2001.
[8082] 2196. Kozak, C. A.; Sears, J. F.; Hoggan, M. D.: Genetic mapping of the mouse proto-oncogene c-sis to chromosome 15. Science 221: 867-869, 1983.
[8083] 2197. Lindahl, P.; Johansson, B. R.; Leveen, P.; Betsholtz, C.: Pericyteloss and microaneurysm formation in PDGFB-deficient mice. Science 277:242-245, 1997.
[8084] 2198. Owen, A. J.; Pantazis, P.; Antoniades, H. N.: Simian sarcomavirus-transformed cells secrete a mitogen identical to platelet-derived growth factor. Science 225: 54-56, 1984.
[8085] 2199. Rao, C. D.; Igarashi, H.; Chiu, I.-M.; Robbins, K. C.; Aaronson, S. A.: Structure and sequence of the human csis/platelet-derived growth factor 2 (SIS/PDGF2) transcriptional unit. Proc. Nat. Acad. Sci. 83: 2392-2396, 1986.
[8086] 2200. Robbins, K. C.; Antoniades, H. N.; Devare, S. G.; Hunkapiller, M. W.; Aaronson, S. A.: Structural and immunological similarities between simian sarcoma virus gene product(s) and human platelet-derived growth factor. Nature 305: 605-608, 1983.
[8087] 2201. Robbins, K. C.; Devare, S. G.; Reddy, E. P.; Aaronson, S. A.: In vivo identification of the transforming gene product of simiansarcoma virus. Science 218: 1131-1133, 1982.
[8088] 2202. Simon, M.-P.; Navarro, M.; Roux, D.; Pouyssegur, J.: Structural and functional analysis of a chimeric protein COL1A1-PDGFB generated by the translocation t(17;22)(q22;q13.1) in dermatofibrosarcoma protuberans (DP). Oncogene 20: 2965-2975, 2001.
[8089] 2203. Smidt, M.; Kirsch, I.; Ratner, L.: Deletion of Alu sequences in the fifth c-sis intron in individuals with meningiomas. J. Clin. Invest. 86: 1151-1157, 1990.
[8090] 2204. Turc-Carel, C.; Philip, I.; Berger, M. P.; Philip, T.; Lenoir, G. M.: Chromosomal translocations in Ewing's sarcoma. (Letter) New Eng. J. Med. 309: 497-498, 1983.
[8091] 2205. Shimizu, A.; O'Brien, K. P.; Sjoblom, T.; Pietras, K.; Buchdunger, E.; Collins, V. P.; Heldin, C.-H.; Dumanski, J. P.; Ostman, A.: Thedermatofibrosarcoma protuberans-associated collagen type I-alpha-1/platelet-derived growth factor (PDGF) beta-chain fusion gene generates a transforming protein that is processed to functional PDGF-BB. Cancer Res. 59:3719-3723, 1999.
[8092] 2206. Simon, M.-P.; Pedeutour, F.; Sirvent, N.; Grosgeorge, J.; Minoletti, F.; Coindre, J.-M.; Terrier-Lacombe, M.-J.; Mandahl, N.; Craver, R. D.; Blin, N.; Sozzi, G.; Turc-Carel, C.; O'Brien, K. P.; Kedra, D.; Fransson, I.; Guilbaud, C.; Dumanski, J. P.: Deregulation of the platelet-derived growth factor B-chain gene via fusion with collagen gene COL1A1 in dermatofibrosarcoma protuberans and giant-cell fibroblastoma. Nature Genet. 15: 95-98, 1997.
[8093] 2207. Waterfield, M. D.; Scrace, G. T.; Whittle, N.; Stroobant, P.; Johnsson, A.; Wasteson, A.; Westermark, B.; Heldin, C.-H.; Huang, J. S.; Deuel, T. F.: Platelet-derived growth factor is structurally related to the putative transforming protein p28(sis) of simian sarcomavirus. Nature 304: 35-39, 1983.
[8094] 2208. Gimona, M.; Small, J. V.; Moeremans, M.; Van Damme, J.; Puype, M.; Vandekerckhove, J.: Porcine vinculin and metavinculin differ by a 68-residue insert located close to the carboxy-terminal part of the molecule. EMBO J. 7: 2329-2334, 1988.
[8095] 2209. Lee, F. S.; Fox, E. A.; Zhou, H.-M.; Strydom, D. J.; Vallee, B. L.: Primary structure of human placental ribonuclease inhibitor. Biochemistry 27:8545-8553, 1988.
[8096] 2210. Weremowicz, S.; Fox, E. A.; Morton, C. C.; Vallee, B. L.: The placental ribonuclease inhibitor (RNH) gene is located on chromosome subband 11p15.5. Genomics 8: 717-721, 1990.
[8097] 2211. Zneimer, S. M.; Crawford, D.; Schneider, N. R.; Beutler, B.: Mapping of the human ribonuclease inhibitor gene (RNH) to chromosome 11p15 by in situ hybridization. Genomics 8: 175-178, 1990.
[8098] 2212. Klingensmith, J.; Nusse, R.; Perrimon, N.: The Drosophila segment polarity gene dishevelled encodes a novel protein required for response to wingless signal. Genes Dev. 8: 118-130, 1994.
[8099] 2213. Bui, T. D.; Beier, D. R.; Jonssen, M.; Smith, K.; Dorrington, S. M.; Kaklamanis, L.; Kearney, L.; Regan, R.; Sussman, D. J.; Harris, A. L.: cDNA cloning of a human dishevelled DVL-3 gene, mapping to 3q27, and expression in human breast and colon carcinomas. Biochem. Biophys. Res. Commun. 239: 510-516, 1997.
[8100] 2214. Cheng, Y.-S. E.; Patterson, C. E.; Staeheli, P.: Interferon-induced guanylate-binding proteins lack an N(T)KXD consensus motif and bindGMP in addition to GDP and GTP. Molec. Cell. Biol. 11: 4717-4725, 1991.
[8101] 2215. Kumar, S.; Li, Q.; Dua, A.; Ying, Y.-K.; Bagchi, M. K.; Bagchi, I. C.: Messenger ribonucleic acid encoding interferon-inducible guanylate binding protein 1 is induced in human endometrium within the putative window of implantation. J. Clin. Endocr. Metab. 86: 2420-2427, 2001.
[8102] 2216. Prochazka, M.; Staeheli, P.; Holmes, R. S.; Haller, O.: Interferon-induced guanylate-binding proteins: mapping of the murine Gbp-1 locus to chromosome 3. Virology 145: 273-279, 1985.
[8103] 2217. Strehlow, I.; Lohmann-Matthes, M. L.; Decker, T.: The interferon-inducible GBP1 gene: structure and mapping to human chromosome 1. Gene 144:295-299, 1994.
[8104] 2218. Aoki, K.; Suzuki, K.; Sugano, T.; Tasaka, T.; Nakahara, K.; Kuge, O.; Omori, A.; Kasai, M.: A novel gene, ‘Translin,’ encodes a recombination hotspot binding protein associated with chromosomal translocations. Nature Genet. 10: 167-174, 1995.
[8105] 2219. Badge, R. M.; Yardley, J.; Jeffreys, A. J.; Armour, J. A. L.: Crossover breakpoint mapping identifies a subtelomeric hotspot formale meiotic recombination. Hum. Molec. Genet. 9: 1239-1244, 2000.
[8106] 2220. Hosaka, T.; Kanoe, H.; Nakayama, T.; Murakami, H.; Yamamoto, H.; Nakamata, T.; Tsuboyama, T.; Oka, M.; Kasai, M.; Sasaki, M. S.; Nakamura, T.; Toguchida, J.: Translin binds to the sequences adjacent to the breakpoints of the TLS and CHOP genes in liposarcomas with translocation t(12;16). Oncogene 19: 5821-5825, 2000.
[8107] 2221. Kasai, M.; Aoki, K.; Matsuo, Y.; Minowada, J.; Maziarz, R. T.; Strominger, J. L.: Recombination hotspot associated factors specifically recognize novel target sequences at the site of interchromosomal rearrangements in T-ALL patients with t(8;14)(q24;q11) and (t(1;14)(p32;q11). Int. Immun. 6: 1017-1025, 1994.
[8108] 2222. Cirillo, L. A.; Lin, F. R.; Cuesta, I.; Friedman, D.; Jarnik, M.; Zaret, K. S.: Opening of compacted chromatin by early developmental transcription factors HNF3(FoxA) and GATA-4. Molec. Cell 9: 279-289, 2002.
[8109] 2223. Braun-Dullaeus, R. C.; Mann, M. J.; Ziegler, A.; von der Leyen, H. E.; Dzau, V. J.: A novel role for the cyclin-dependent kinase inhibitor p27(Kip1) in angiotensin II-stimulated vascular smooth muscle cell hypertrophy. J. Clin. Invest. 104: 815-823, 1999.
[8110] 2224. Carrano, A. C.; Eytan, E.; Hershko, A.; Pagano, M.: SKP2 is required for ubiquitin-mediated degradation of the CDK inhibitor p27. Nature Cell Biol. 1: 193-199, 1999.
[8111] 2225. Di Cristofano, A.; De Acetis, M.; Koff, A.; Cordon-Cardo, C.; Pandolfi, P. P.: Pten and p27(KIP1) cooperate in prostate cancer tumor suppression in the mouse. Nature Genet. 27: 222-224, 2001.
[8112] 2226. Fero, M. L.; Rivkin, M.; Tasch, M.; Porter, P.; Carow, C. E.; Firpo, E.; Polyak, K.; Tsai, L.-H.; Broudy, V.; Perlmutter, R. M.; Kaushansky, K.; Roberts, J. M.: A syndrome of multiorgan hyperplasia with features of gigantism, tumorigenesis, and female sterility in p27(Kip1)-deficient mice. Cell 85: 733-744, 1996.
[8113] 2227. Buyse, I. M.; Shao, G.; Huang, S.: The retinoblastoma protein binds to RIZ, a zinc-finger protein that shares an epitope with the adenovirus E1A protein. Proc. Nat. Acad. Sci. 92: 4467-4471, 1995.
[8114] 2228. Buyse, I. M.; Takahashi, E.; Huang, S.: Physical mapping of theretinoblastoma interacting zinc finger gene RIZ to D1S228 on chromosome 1p36. Genomics 34: 119-121, 1996.
[8115] 2229. Chadwick, R. B.; Jiang, G.-L.; Bennington, G. A.; Yuan, B.; Johnson, C. K.; Stevens, M. W.; Niemann, T. H.; Peltomaki, P.; Huang, S.; dela Chapelle, A.: Candidate tumor suppressor RIZ is frequently involved in colorectal carcinogenesis. Proc. Nat. Acad. Sci. 97: 2662-2667, 2000.
[8116] 2230. Mock, B. A.; Coleman, M. P.; Huang, S.: Riz maps to distal chromosome 4 near genes involved in tumorigenesis and nerve degeneration. Mammalian Genome 7: 637 only, 1996.
[8117] 2231. Poetsch, M.; Dittberner, T.; Woenckhaus, C.: Frameshift mutations of RIZ, but no point mutations in RIZ1 exons in malignant melanomas with deletions in 1p36. Oncogene 21: 3038-3042, 2002.
[8118] 2232. Malek, N. P.; Sundberg, H.; McGrew, S.; Nakayama, K.; Kyriakidis, T. R.; Roberts, J. M.: A mouse knock-in model exposes sequential proteolytic pathways that regulate p27(Kip1) in G1 and S phase. Nature 413:323-327, 2001.
[8119] 2233. Martin, E.; Cacheux, V.; Cave, H.; Lapierre, J. M.; Le\Paslier, D.; Grandchamp, B.: Localization of the CDKN4/p27(Kip1) gene to human chromosome 12p12.3. Hum. Genet. 96: 668-670, 1995.
[8120] 2234. Mitsuhashi, T.; Aoki, Y.; Eksioglu, Y. Z.; Takahashi, T.; Bhide, P. G.; Reeves, S. A.; Caviness, V. S., Jr.: Overexpression of p27(Kip1) lengthens the G1 phase in a mouse model that targets inducible gene expression to central nervous system progenitor cells. Proc. Nat. Acad. Sci. 98: 6435-6440, 2001.
[8121] 2235. Polyak, K.; Lee, M.-H.; Erdjument-Bromage, H.; Koff, A.; Roberts, J. M.; Tempst, P.; Massague, J.: Cloning of p27(Kip1), a cyclin-dependent kinase inhibitor and a potential mediator of extracellular antimitogenic signals. Cell 78: 59-66, 1994.
[8122] 2236. Saito, T.; Seki, N.; Hattori, A.; Hayashi, A.; Abe, M.; Araki, R.; Fujimori, A.; Fukumura, R.; Kozuma, S.; Matsuda, Y.: Structure, expression profile, and chromosomal location of a mouse gene homologous to human DNA-PK(cs) interacting protein (KIP) gene. Mammalian Genome 10:315-317, 1999.
[8123] 2237. Sherr, C. J.; Roberts, J. M.: Inhibitors of mammalian G1 cyclin-dependent kinases. Genes Dev. 9: 1149-1163, 1995.
[8124] 2238. Toyoshima, H.; Hunter, T.: p27, a novel inhibitor of G1 cyclin-Cdk protein kinase activity, is related to p21. Cell 78: 67-74, 1994.
[8125] 2239. Druck, T.; Gu, Y.; Prabhala. G.; Cannizzaro, L. A.; Park, S.-H.; Huebner, K.; Keen, J. H.: Chromosome localization of human genes for clathrin adaptor polypeptides AP2-beta and AP50 and the clathrin-binding protein, VCP. Genomics 30: 94-97, 1995.
[8126] 2240. Ponnambalam, S.; Robinson, M. S.; Jackson, A. P.; Peiperl, L.; Parham, P.: Conservation and diversity in families of coated vesicle adaptins. J. Biol. Chem. 265: 4814-4820, 1990.
[8127] 2241. Kaneko-Ishino, T.; Kuroiwa, Y.; Miyoshi, N.; Kohda, T.; Suzuki, R.; Yokoyama, M.; Viville, S.; Barton, S. C.; Ishino, F.; Surani, M. A.: Peg1/Mest imprinted gene on chromosome 6 identified by cDNA subtraction hybridization. Nature Genet. 11: 52-59, 1995.
[8128] 2242. Kobayashi, S.; Kohda, T.; Miyoshi, N.; Kuroiwa, Y.; Aisaka, K.; Tsutsumi, O.; Kaneko-Ishino, T.; Ishino, F.: Human PEG1/MEST, an imprinted gene on chromosome 7. Hum. Molec. Genet. 6: 781-786, 1997.
[8129] 2243. Kosaki, K.; Kosaki, R.; Craigen, W. J.; Matsuo, N.: Isoform-specific imprinting of the human PEG1/MEST gene. (Letter) Am. J. Hum. Genet. 66:309-312, 2000.
[8130] 2244. Kotzot, D.; Schmitt, S.; Bernasconi, F.; Robinson, W. P.; Lurie, I. W.; Ilyina, H.; Mehes, K.; Hamel, B. C. J.; Otten, B. J.; Hergersberg, M.; Werder, E.; Shoenle, E.; Schinzel, A.: Uniparental disomy 7 in Silver-Russell syndrome and primordial growth retardation. Hum. Molec. Genet. 4: 583-587, 1995.
[8131] 2245. Lefebvre, L.; Viville, S.; Barton, S. C.; Ishino, F.; Keverne, E. B.; Surani, M. A.: Abnormal maternal behaviour and growth retardation associated with loss of the imprinted gene Mest. Nature Genet. 20:163-169, 1998.
[8132] 2246. Lefebvre, L.; Viville, S.; Barton, S. C.; Ishino, F.; Surani, M. A.: Genomic structure and parent-of-origin-specific methylation of Pegl. Hum. Molec. Genet. 6: 1907-1915, 1997.
[8133] 2247. Ayala-Madrigal, M. L.; Doerr, S.; Ramirez-Duenas, M. L.; Hansmann, I.: Assignment of karyopherin alpha 1 (KPNA1) to human chromosome band 3q21 by in situ hybridization. Cytogenet. Cell Genet. 90: 58-59, 2000.
[8134] 2248. Conti, E.; Uy, M.; Leighton, L.; Blobel, G.; Kuriyan, J.: Crystallographic analysis of the recognition of a nuclear localization signal by the nuclear import factor karyopherin alpha. Cell 94: 193-204, 1998.
[8135] 2249. Cortes, P.; Ye, Z.-S.; Baltimore, D.: RAG-1 interacts with the repeated amino acid motif of the human homologue of the yeast protein SRP1. Proc. Nat. Acad. Sci. 91: 7633-7637, 1994.
[8136] 2250. Barichard, F.; Joulin, V.; Henry, I.; Garel, M.-C.; Valentin, C.; Rosa, R.; Cohen-Solal, M.; Junien, C.: Chromosomal assignment of the human 2,3-bisphosphoglycerate mutase gene (BPGM) to region 7q34-7q22. Hum. Genet. 77: 283-285, 1987.
[8137] 2251. Bowdler, A. J.; Prankerd, T. A. J.: Studies in congenital non-spherocytichaemolytic anaemias with specific enzyme defects. Acta Haemat. 31:65-78, 1964.
[8138] 2252. Chen, S.-H.; Anderson, J. E.; Giblett, E. R.: 2,3-diphosphoglyceratemutase: its demonstration by electrophoresis and the detection of a genetic variant. Biochem. Genet. 5: 481-486, 1971.
[8139] 2253. Galacteros, F.; Rosa, R.; Prehu, M. O.; Najean, Y.; Calvin, M. C.: Deficit en diphosphoglycerate mutase: nouveaux cas associes aune polyglobulie. Nouv. Rev. Franc. Hemat. 26: 69-74, 1984.
[8140] 2254. Joulin, V.; Barichard, F.; Henry, I.; Garel, M. C.; Valentin, C.; Rosa, R.; Cohen-Solal, M.; Junien, C.: Chromosomal assignment of the human 2,3-bisphosphoglycerate mutase gene (BPGM) to region 7q22-7q34. (Abstract) Cytogenet. Cell Genet. 46: 635 only, 1987.
[8141] 2255. Joulin, V.; Garel, M.-C.; Le Boulch, P.; Valentin, C.; Rosa, R.; Rosa, J.; Cohen-Solal, M.: Isolation and characterization of the human 2,3-bisphosphoglycerate mutase gene. J. Biol. Chem. 263: 15785-15790, 1988.
[8142] 2256. Joulin, V.; Peduzzi, J.; Romeo, P.-H.; Rosa, R.; Valentin, C.; Dubart, A.; Lapeyre, B.; Blouquit, Y.; Garel, M.-C.; Goossens, M.; Rosa, J.; Cohen-Solal, M.: Molecular cloning and sequencing of the human erythrocyte 2,3-bisphosphoglycerate mutase cDNA: revised amino acid sequence. EMBO J. 5: 2275-2283, 1986.
[8143] 2257. Labie, D.; Leroux, J.-P.; Najman, A.; Reyrolle, C.: Familial diphosphoglycerate mutase deficiency: influence on the oxygen affinity curves of hemoglobin. FEBS Lett. 9: 37-40, 1970.
[8144] 2258. Lemarchandel, V.; Joulin, V.; Valentin, C.; Rosa, R.; Galacteros, F.; Rosa, J.; Cohen-Solal, M.: Compound heterozygosity in a complete erythrocyte bisphosphoglycerate mutase deficiency. Blood 80: 2643-2649, 1992.
[8145] 2259. Rosa, R.; Audit, I.; Rosa, J.: Diphosphoglycerate mutase and 2,3-diphosphoglycerate phosphatase activities of red cells: comparative electrophoretic study. Biochem. Biophys. Res. Commun. 51: 536-542, 1973.
[8146] 2260. Rosa, R.; Blouquit, Y.; Calvin, M.-C.; Prome, D.; Prome, J.-C.; Rosa, J.: Isolation, characterization, and structure of a mutant89 arg-to-cys bisphosphoglycerate mutase: implication of the active site in the mutation. J. Biol. Chem. 264: 7837-7843, 1989.
[8147] 2261. Rosa, R.; Prehu, M.-O.; Beuzard, Y.; Rosa, J.: The first case of a complete deficiency of diphosphoglycerate mutase in human erythrocytes. J. Clin. Invest. 62: 907-915, 1978.
[8148] 2262. Sasaki, R.; Ikura, K.; Sugimoto, E.; Chiba, H.: Purification of bisphosphoglyceromutase, 2,3-bisphosphoglycerate phosphatase and phosphoglyceromutase from human erythrocytes. Europ. J. Biochem. 50:581-593, 1975.
[8149] 2263. Schroter, W.: Kongenitale nichtsphaerocytaere haemolytische Anaemiebei 2,3-Diphosphoglyceratmutasemangel der Erythrocyten im fruehen Saeuglingsalter. Klin. Wschr. 43: 1147-1153, 1965.
[8150] 2264. Scott, E. M.; Wright, R. C.: An alternate method for demonstration of bisphosphoglyceromutase (DPGM) on starch gels. Am. J. Hum. Genet. 34:1013-1015, 1982.
[8151] 2265. Yanagawa, S.; Hitomi, K.; Sasaki, R.; Chiba, H.: Isolation and characterization of cDNA encoding rabbit reticulocyte 2,3-bisphosphoglycerate synthase. Gene 44: 185-191, 1986.
[8152] 2266. Hiesberger, T.; Trommsdorff, M.; Howell, B. W.; Goffinet, A.; Mumby, M. C.; Cooper, J. A.; Herz, J.: Direct binding of reelin to VLDL receptor and apoE receptor 2 induces tyrosine phosphorylation of disabled-1 and modulates tau phosphorylation. Neuron 24: 481-489, 1999.
[8153] 2267. Trommsdorff, M.; Gotthardt, M.; Hiesberger, T.; Shelton, J.; Stockinger, W.; Nimpf, J.; Hammer, R. E.; Richardson, J. A.; Herz, J.: Reeler/Disabled-like disruption of neuronal migration in knockout mice lacking the VLDL-receptor and ApoE receptor 2. Cell 97: 689-701, 1999.
[8154] 2268. Huebner, K.; Druck, T.; Croce, C. M.; Thiesen, H. J.: Twenty-seven nonoverlapping zinc finger cDNAs from human T cells map to nine different chromosomes with apparent clustering. Am. J. Hum. Genet. 48: 726-740, 1991.
[8155] 2269. Rousseau-Merck, M.-F.; Hillion, J.; Jonveaux, P.; Couillin, P.; Seite, P.; Thiesen, H.-J.; Berger, R.: Chromosomal localization of9 KOX zinc finger genes: physical linkages suggest clustering of KOX genes on chromosomes 12, 16, and 19. Hum. Genet. 92: 583-587, 1993.
[8156] 2270. Lehmann, O. J.; El-ashry, M. F.; Ebenezer, N. D.; Ocaka, L.; Francis, P. J.; Wilkie, S. E.; Patel, R. J.; Ficker, L.; Jordan, T.; Khaw, P. T.; Bhattacharya, S. S.: A novel keratocan mutation causing autosomal recessive cornea plana. Invest. Ophthal. Vis. Sci. 42: 3118-3122, 2001.
[8157] 2271. DiLella, A. G.: Chromosomal assignment of the human immunophilin FKBP-12 gene. Biochem. Biophys. Res. Commun. 179: 1427-1433, 1991.
[8158] 2272. DiLella, A. G.; Hawkins, A.; Craig, R. J.; Schreiber, S. L.; Griffin, C. A.: Chromosomal band assignments of the genes encoding human FKBP12 and FKBP13. Biochem. Biophys. Res. Commun. 189: 819-823, 1992.
[8159] 2273. Goebl, M. G.: The peptidyl-prolyl isomerase, FK506-binding protein, is most likely the 12 kd endogenous inhibitor 2 of protein kinase C. (Letter) Cell 64: 1051-1052, 1991.
[8160] 2274. Jin, Y.-J.; Albers, M. W.; Lane, W. S.; Bierer, B. E.; Schreiber, S. L.; Burakoff, S. J.: Molecular cloning of a membrane-associated human FK506- and rapamycin-binding protein, FKBP-13. Proc. Nat. Acad. Sci. 88: 6677-6681, 1991.
[8161] 2275. Maki, N.; Sekiguchi, F.; Nishimaki, J.; Miwa, K.; Hayano, T.; Takahashi, N.; Suzuki, M.: Complementary DNA encoding the human T-cell FK506-binding protein, a peptidylprolyl cis-trans isomerase distinct from cyclophilin. Proc. Nat. Acad. Sci. 87: 5440-5443, 1990.
[8162] 2276. Peattie, D. A.; Hsaio, K.; Benasutti, M.; Lippke, J. A.: Three distinct messenger RNAs can encode the human immunosuppressant-binding protein FKBP12. Gene 150: 251-257, 1994.
[8163] 2277. Shou, W.; Aghdasi, B.; Armstrong, D. L.; Guo, Q.; Bao, S.; Charng, M.-J.; Mathews, L. M.; Schneider, M. D.; Hamilton, S. L.; Matzuk, M. M.: Cardiac defects and altered ryanodine receptor function in mice lacking FKBP12. Nature 391: 489-492, 1998.
[8164] 2278. Standaert, R. F.; Galat, A.; Verdine, G. L.; Schreiber, S. L.: Molecular cloning and overexpression of the human FK506-binding protein FKBP. Nature 346: 671-674, 1990.
[8165] 2279. Wang, T.; Donahoe, P. K.; Zervos, A. S.: Specific interaction of type I receptors of the TGF-beta family with the immunophilin FKBP-12. Science 265:674-676, 1994.
[8166] 2280. Martell, K. J.; Kwak, S.; Hakes, D. J.; Dixon, J. E.; Trent, J. M.: Chromosomal localization of four human VH1-like protein-tyrosine phosphatases. Genomics 22: 462-464, 1994.
[8167] 2281. Bogenmann, E.; Lochrie, M. A.; Simon, M. I.: Cone cell-specificgenes expressed in retinoblastoma. Science 240: 76-78, 1988.
[8168] 2282. Bonaiti-Pellie, C.; Briard-Guillemot, M. L.: Segregation analysisin hereditary retinoblastoma. Hum. Genet. 57: 411-419, 1981.
[8169] 2283. Hunter, A. G. W.; Thompson, M. W.: Acromesomelic dwarfism: description of a patient and comparison with previously reported cases. Hum. Genet. 34: 107-113, 1976.
[8170] 2284. Miceli-Richard, C.; Lesage, S.; Rybojad, M.; Prieur, A.-M.; Manouvrier-Hanu, S.; Hafner, R.; Chamaillard, M.; Zouali, H.; Thomas, G.; Hugot, J.-P.: CARD15 mutations in Blau syndrome. Nature Genet. 29: 19-20, 2001.
[8171] 2285. Han, L. Wong, D.; Dhaka, A.; Afar, D.; White, M.; Xie, W.; Herschman, H.; Witte, O.: Colicelli, J.: Protein binding and signaling properties of RIN1 suggest a unique effector function. Proc. Nat. Acad. Sci. 94:4954-4959, 1997.
[8172] 2286. Jhanwar, S. C.; Neel, B. G.; Hayward, W. S.; Chaganti, R. S. K.: Localization of the cellular oncogenes ABL, SIS, and FES on human germ-line chromosomes. Cytogenet. Cell Genet. 38: 73-75, 1984.
[8173] 2287. Bao, S.; Tibbetts, R. S.; Brumbaugh, K. M.; Fang, Y.; Richardson, D. A.; Ali, A.; Chen, S. M.; Abraham, R. T.; Wang, X.-F.: ATR/ATM-mediatedphosphorylation of human Rad17 is required for genotoxic stress responses. Nature 411:969-974, 2001.
[8174] 2288. Goedert, M.; Hasegawa, J.; Craxton, M.; Leversha, M. A.; Clegg, S.: Assignment of the human stress-activated protein kinase-3 gene (SAPK3) to chromosome 22q13.3 by fluorescence in situ hybridization. Genomics 41:501-502, 1997.
[8175] 2289. Avraham, K. B.; Prezioso, V. R.; Chen, W. S.; Lai, E.; Sladek, F. M.; Zhong, W.; Darnell, J. E., Jr.; Jenkins, N. A.; Copeland, N. G.: Murine chromosomal location of four hepatocyte-enriched transcriptionfactors: HNF-3-alpha, HNF-3-beta, HNF-3-gamma, and HFN-4. Genomics 13:264-268, 1992.
[8176] 2290. Kaestner, K. H.; Hiemisch, H.; Luckow, B.; Schutz, G.: The HNF-3 gene family of transcription factors in mice: gene structure, cDNAsequence, and mRNA distribution. Genomics 20: 377-385, 1994.
[8177] 2291. Mincheva, A.; Lichter, P.; Schutz, G.; Kaestner, K. H.: Assignment of the human genes for hepatocyte nuclear factor 3-alpha, -beta, and -gamma (HNF3A, HNF3B, HNF3G) to 14q12-q13, 20p11, and 19q13.2-q13.4. Genomics 39:417-419, 1997.
[8178] 2292. Adams, R. H.; Porras, A.; Alonso, G.; Jones, M.; Vintersten, K.; Panelli, S.; Valladares, A.; Perez, L.; Klein, R.; Nebreda, A. R.: Essential role of p38-alpha MAP kinase in placental but not embryoniccardiovascular development. Molec. Cell 6: 109-116, 2000.
[8179] 2293. Ge, B.; Gram, H.; Di Padova, F.; Huang, B.; New, L.; Ulevitch, R. J.; Luo, Y.; Han, J.: MAPKK-independent activation of p38-alphamediated by TAB1-dependent autophosphorylation of p38-alpha. Science 295:1291-1294, 2002.
[8180] 2294. Han, J.; Lee, J.-D.; Bibbs, L.; Ulevitch, R. J.: A MAP kinasetargeted by endotoxin and hyperosmolarity in mammalian cells. Science 265:808-811, 1994.
[8181] 2295. Kim, D. H.; Feinbaum, R.; Alloing, G.; Emerson, F. E.; Garsin, D. A.; Inoue, H.; Tanaka-Hino, M.; Hisamoto, N.; Matsumoto, K.; Tan, M.-W.; Ausubel, F. M.: A conserved p38 MAP kinase pathway in Caenorhabditis elegans innate immunity. Science 297: 623-626, 2002.
[8182] 2296. Kumar, S.; McLaughlin, M. M.; McDonnell, P. C.; Lee, J. C.; Livi, G. P.; Young, P. R.: Human mitogen-activated protein kinase CSBP1, but not CSBP2, complements a hogl deletion in yeast. J. Biol. Chem. 270:29043-29046, 1995.
[8183] 2297. Lee, J. C.; Laydon, J. T.; McDonnell, P. C.; Gallagher, T. F.; Kumar, S.; Green, D.; McNulty, D.; Blumenthal, M. J.; Heys, J. R.; Landvatter, S. W.; Stickler, J. E.; McLaughlin, M. M.; Siemens, I. R.; Fisher, S. M.; Livi, G. P.; White, J. R.; Adams, J. L.; Young, P. R.: A protein kinase involved in the regulation of inflammatorycytokine biosynthesis. Nature 372: 739-746, 1994.
[8184] 2298. Liao, P.; Georgakopoulos, D.; Kovacs, A.; Zheng, M.; Lerner, D.; Pu, H.; Saffitz, J.; Chien, K.; Xiao, R.-P.; Kass, D. A.; Wang, Y.: The in vivo role of p38 MAP kinases in cardiac remodeling and restrictivecardiomyopathy. Proc. Nat. Acad. Sci. 98: 12283-12288, 2001.
[8185] 2299. Maizels, E. T.; Mukherjee, A.; Sithanandam, G.; Peters, C. A.; Cottom, J.; Mayo, K. E.; Hunzicker-Dunn, M.: Developmental regulation of mitogen-activated protein kinase-activated kinases-2 and -3 (MAPKAPK-2/-3) in vivo during corpus luteum formation in the rat. Molec. Endocr. 15:716-733, 2001.
[8186] 2300. McDonnell, P. C.; DiLella, A. G.; Lee, J. C.; Young, P. R.: Localization of the human stress responsive MAP kinase-like CSAIDs binding protein (CSBP) gene to chromosome 6p21.3/21.2. Genomics 29: 301-302, 1995.
[8187] 2301. New, L.; Jiang, Y.; Zhao, M.; Liu, K.; Zhu, W.; Flood, L. J.; Kato, Y.; Parry, G. C. N.; Han, J.: PRAK, a novel protein kinaseregulated by the p38 MAP kinase. EMBO J. 17: 3372-3384, 1998.
[8188] 2302. Ni, H.; Wang, X. S.; Diener, K.; Yao, Z.: MAPKAPK5, a novel mitogen-activated protein kinase (MAPK)-activated protein kinase, is a substrate of the extracellular-regulated kinase (ERK) and p38 kinase. Biochem. Biophys. Res. Commun. 243: 492-496, 1998.
[8189] 2303. Takekawa, M.; Maeda, T.; Saito, H.: Protein phosphatase 2C-alphainhibits the human stress-responsive p38 and JNK MAPK pathways. EMBO J. 17: 4744-4752, 1998.
[8190] 2304. Tamura, K.; Sudo, T.; Senftleben, U.; Dadak, A. M.; Johnson, R.; Karin, M.: Requirement for p38-alpha in erythropoietin expression: a role for stress kinases in erythropoiesis. Cell 102: 221-231, 2000.
[8191] 2305. Haber, N.; Stengel, D.; Defer, N.; Roeckel, N.; Mattei, M.-G.; Hanoune, J.: Chromosomal mapping of human adenylyl cyclase genestype III, type V and type VI. Hum. Genet. 94: 69-73, 1994.
[8192] 2306. Anand, A.; Chada, K.: In vivo modulation of Hmgic reduces obesity. Nature Genet. 24: 377-380, 2000.
[8193] 2307. Arlotta, P.; Tai, A. K.-F.; Manfioletti, G.; Clifford, C.; Jay, G.; Ono, S. J.: Transgenic mice expressing a truncated form of the high mobility group I-C protein develop adiposity and an abnormallyhigh prevalence of lipomas. J. Biol. Chem. 275: 14394-14400, 2000.
[8194] 2308. Ashar, H. R.; Cherath, L.; Przybysz, K. M.; Chada, K.: Genomiccharacterization of human HMGIC, a member of the accessory transcriptionfactor family found at translocation breakpoints in lipomas. Genomics 31:207-214, 1996.
[8195] 2309. Ashar, H. R.; Schoenberg Fejzo, M.; Tkachenko, A.; Zhou, X.; Fletcher, J. A.; Weremowicz, S.; Morton, C. C.; Chada, K.: Disruption of the architectural factor HMGI-C: DNA-binding AT hook motifs fused in lipomas to distinct transcriptional regulatory domains. Cell 82: 57-65, 1995.
[8196] 2310. Chau, K.-Y.; Patel, U. A.; Lee, K.-L. D.; Lam, H.-Y. P.; Crane-Robinson, C.: The gene for the human architectural transcription factor HMGI-Cconsists of five exons each coding for a distinct functional element. Nucleic Acids Res. 23: 4262-4266, 1995.
[8197] 2311. Danforth, E., Jr.: Failure of adipocyte differentiation causestype II diabetes mellitus. Nature Genet. 26: 13 only, 2000.
[8198] 2312. Friedmann, M.; Holth, L. T.; Zoghbi, H. Y.; Reeves, R.: Organization, inducible-expression and chromosome localization of the human HMG-I(Y) nonhistone protein gene. Nucleic Acids Res. 21: 4259-4267, 1993.
[8199] 2313. Ishwad, C. S.; Shriver, M. D.; Lassige, D. M.; Ferrell, R. E.: The high mobility group I-C gene (HMGI-C): polymorphism and geneticlocalization. Hum. Genet. 99: 103-105, 1997.
[8200] 2314. Kazmierczak, B.; Dal Cin, P.; Wanschura, S.; Bartnitzke, S.; Vanden Berghe, H.; Bullerdiek, J.: Cloning and molecular characterization of part of a new gene fused to HMGIC in mesenchymal tumors. Am. J. Path. 152: 431-435, 1998.
[8201] 2315. Kazmierczak, B.; Pohnke, Y.; Bullerdiek, J.: Fusion transcriptsbetween the HMGIC gene and RTVL-H-related sequences in mesenchymaltumors without cytogenetic aberrations. Genomics 38: 223-226, 1996.
[8202] 2316. Manfioletti, G.; Rustighi, A.; Mantovani, F.; Goodwin, G. H.; Giancotti, V.: Isolation and characterization of the gene coding for murine high-mobility-group protein HMGI-C. Gene 167: 249-253, 1995.
[8203] 2317. Mine, N.; Kurose, K.; Nagai, H.; Doi, D.; Ota, Y.; Yoneyama, K.; Konishi, H.; Araki, T.; Emi, M.: Gene fusion involving HMGIC is afrequent aberration in uterine leiomyomas. J. Hum. Genet. 46: 408-412, 2001.
[8204] 2318. Nucci, M. R.; Weremowicz, S.; Neskey, D. M.; Sornberger, K.; Tallini, G.; Morton, C. C.; Quade, B. J.: Chromosomal translocation t(8;12) induces aberrant HMGIC expression in aggressive angiomyxoma of the vulva. Genes Chromosomes Cancer 32: 172-176, 2001.
[8205] 2319. Seimiya, H.; Sawabe, T.; Inazawa, J.; Tsuruo, T.: Cloning, expression and chromosomal localization of a novel gene for protein tyrosine phosphatase (PTP-U2) induced by various differentiation-inducing agents. Oncogene 10:1731-1738, 1995.
[8206] 2320. Wiggins, R. C.; Wiggins, J. E.; Goyal, M.; Wharram, B. L.; Thomas, P. E.: Molecular cloning of cDNAs encoding human GLEPP1, a membranep rotein tyrosine phosphatase: characterization of the GLEPP1 protein distribution in human kidney and assignment of the GLEPP1 gene to human chromosome 12p12-p13. Genomics 27: 174-181, 1995.
[8207] 2321. Jia, S.; Van Dusen, W. J.; Diehl, R. E.; Kohl, N. E.; Dixon, R. A. F.; Elliston, K. O.; Stern, A. M.; Friedman, P. A.: cDNA cloning and expression of bovine aspartyl (asparaginyl) beta-hydroxylase. J. Biol. Chem. 267: 14322-14327, 1992.
[8208] 2322. Korioth, F.; Gieffers, C.; Frey, J.: Cloning and characterization of the human gene encoding aspartyl beta-hydroxylase. Gene 150:395-399, 1994.
[8209] 2323. Lavaissiere, L.; Jia, S.; Nishiyama, M.; de la Monte, S.; Stern, A. M.; Wands, J. R.; Friedman, P. A.: Overexpression of human aspartyl(asparaginyl)-beta-hydroxylase in hepatocellular carcinoma and cholangiocarcinoma. J. Clin. Invest. 98:1313-1323, 1996.
[8210] 2324. Lim, K. Y.; Hong, C.-S.; Kim, D. H.: cDNA cloning and characterization of human cardiac junctin. Gene 255: 35-42, 2000.
[8211] 2325. Scott, A. F.: Personal Communication. Baltimore, Md. Feb. 19, 2001.
[8212] 2326. Treves, S.; Feriotto, G.; Moccagatta, L.; Gambari, R.; Zorzato, F.: Molecular cloning, expression, functional characterization, chromosomal localization, and gene structure of junctate, a novel integral calcium binding protein of sarco(endo)plasmic reticulum membrane. J. Biol. Chem. 275: 39555-39568, 2000.
[8213] 2327. Wetzel, G. T.; Ding, S.; Chen, F.: Molecular cloning of junctin from human and developing rabbit heart. Molec. Genet. Metab. 69:252-258, 2000.
[8214] 2328. Vikkula, M.; Boon, L. M.; Carraway, K. L., III; Calvert, J. T.; Diamonti, A. J.; Goumnerov, B.; Pasyk, K. A.; Marchuk, D. A.; Warman, M. L.; Cantley, L. C.; Mulliken, J. B.; Olsen, B. R.: Vascular dysmorphogenesis caused by an activating mutation in the receptor tyrosine kinase TIE2. Cell 87:1181-1190, 1996.
[8215] 2329. Barker, H. M.; Brewis, N. D.; Street, A. J.; Spurr, N. K.; Cohen, P. T. W.: Three genes for protein phosphatase 1 map to different human chromosomes: sequence, expression and gene localisation of protein serine/threonine phosphatase 1 beta (PPP1CB). Biochim. Biophys. Acta 1220:212-218, 1994.
[8216] 2330. Saadat, M.; Kakinoki, Y.; Mizuno, Y.; Kikuchi, K.; Yoshida, M. C.: Chromosomal localization of human, rat, and mouse protein phosphatase type 1 beta catalytic subunit genes (PPP1CB) by fluorescence in situ hybridization. Jpn. J. Genet. 69: 697-700, 1994.
[8217] 2331. Becq, F.; Hamon, Y.; Bajetto, A.; Gola, M.; Verrier, B.; Chimini, G.: ABC1, an ATP binding cassette transporter required for phagocytosis of apoptotic cells, generates a regulated anion flux after expression in Xenopus laevis oocytes. J. Biol. Chem. 272: 2695-2699, 1997.
[8218] 2332. Decottignies, A.; Goffeau, A.: Complete inventory of the yeast ABC proteins. Nature Genet. 15: 137-145, 1997.
[8219] 2333. Guo, Z.; Inazu, A.; Yu, W.; Suzumura, T.; Okamoto, M.; Nohara, A.; Higashikata, T.; Sano, R.; Wakasugi, K.; Hayakawa, T.; Yoshida, K.; Suchiro, T.; Schmitz, G.; Mabuchi, H.: Double deletions and missense mutations in the first nucleotide-binding fold of the ATP-binding cassette transporter A1 (ABCA1) gene in Japanese patients with Tangier disease. J. Hum. Genet. 47: 325-329, 2002.
[8220] 2334. Hong, S. H.; Rhyne, J.; Zeller, K.; Miller, M.: Novel ABCA1 compound variant associated with HDL cholesterol deficiency. Biochim. Biophys. Acta 1587: 60-64, 2002.
[8221] 2335. Huang, W.; Moriyama, K.; Koga, T.; Hua, H.; Ageta, M.; Kawabata, S.; Mawatari, K.; Imamura, T.; Eto, T.; Kawamura, M.; Teramoto, T.; Sasaki, J.: Novel mutations in ABCA1 gene in Japanese patients with Tangier disease and familial high density lipoprotein deficiency with coronary heart disease. Biochim. Biophys. Acta 1537: 71-78, 2001.
[8222] 2336. Ishii, J.; Nagano, M.; Kujiraoka, T.; Ishihara, M.; Egashira, T.; Takada, D.; Tsuji, M.; Hattori, H.; Emi, M.: Clinical variant of Tangier disease in Japan: mutation of the ABCA1 gene in hypoalphalipoproteinemia with corneal lipidosis. J. Hum. Genet. 47: 366-369, 2002.
[8223] 2337. Jennings, M. W.; Jones, R. W.; Wood, W. G.; Weatherall, D. J.: Analysis of an inversion within the human beta globin gene cluster. Nucleic Acids Res. 13: 2897-2906, 1985.
[8224] 2338. Kulozik, A. E.; Bellan-Koch, A.; Kohne, E.; Kleihauer, E.: A deletion/inversion rearrangement of the beta-globin gene cluster in a Turkish family with delta-beta(0)-thalassemia intermedia. Blood 79:2455-2459, 1992.
[8225] 2339. Langmann, T.; Klucken, J.; Reil, M.; Liebisch, G.; Luciani, M.-F.; Chimini, G.; Kaminski, W. E.; Schmitz, G.: Molecular cloning of the human ATP-binding cassette transporter 1 (hABC1): evidence for sterol-dependent regulation in macrophages. Biochem. Biophys. Res. Commun. 257: 29-33, 1999.
[8226] 2340. Lawn, R. M.; Wade, D. P.; Garvin, M. R.; Wang, X.; Schwartz, K.; Porter, J. G.; Seilhamer, J. J.; Vaughan, A. M.; Oram, J. F.: The Tangier disease gene product ABC1 controls the cellular apolipoprotein-mediated lipid removal pathway. J. Clin. Invest. 104: R25-R31, 1999.
[8227] 2341. Luciani, M. F.; Denizot, F.; Savary, S.; Mattei, M. G.; Chimini, G.: Cloning of two novel ABC transporters mapping on human chromosome 9. Genomics 21: 150-159, 1994.
[8228] 2342. Lapicka-Bodzioch, K.; Bodzioch, M.; Krull, M.; Kielar, D.; Probst, M.; Kiec, B.; Andrikovics, H.; Bottcher, A.; Hubacek, J.; Aslanidis, C.; Suttorp, N.; Schmitz, G.: Homogeneous assay based on 52 primer sets to scan for mutations of the ABCA1 gene and its application in genetic analysis of a new patient with familial high-density lipoprotein deficiency syndrome. Biochim. Biophys. Acta 1537: 42-48, 2001.
[8229] 2343. Marcil, M.; Boucher, B.; Krimbou, L.; Solymoss, B. C.; Davignon, J.; Frohlich, J.; Genest, J., Jr.: Severe familial HDL deficiency in French-Canadian kindreds: clinical, biochemical, and molecular characterization. Arterioscler. Thromb. Vasc. Biol. 15: 1015-1024, 1995.
[8230] 2344. Marcil, M.; Yu, L.; Krimbou, L.; Boucher, B.; Oram, J. F.; Cohn, J. S.; Genest, J., Jr.: Cellular cholesterol transport and efflux in fibroblasts are abnormal in subjects with familial HDL deficiency. Arterioscler. Thromb. Vasc. Biol. 19: 159-169, 1999.
[8231] 2345. McNeish, J.; Aiello, R. J.; Guyot, D.; Turi, T.; Gabel, C.; Aldinger, C.; Hoppe, K. L.; Roach, M. L.; Royer, L. J.; de Wet, J.; Broccardo, C.; Chimini, G.; Francone, O. L.: High density lipoprotein deficiency and foam cell accumulation in mice with targeted disruption of ATP-binding cassette transporter-1. Proc. Nat. Acad. Sci. 97: 4245-4250, 2000.
[8232] 2346. Pullinger, C. R.; Hakamata, H.; Duchateau, P. N.; Eng, C.; Aouizerat, B. E.; Cho, M. H.; Fielding, C. J.; Kane, J. P.: Analysis of hABC1 gene 5-prime end: additional peptide sequence, promoter region, and four polymorphisms. Biochem. Biophys. Res. Commun. 271: 451-455, 2000.
[8233] 2347. Petit, M. M. R.; Schoenmakers, E. F. P. M.; Huysmans, C.; Geurts, J. M. W.; Mandahl, N.; Van de Ven, W. J. M.: LHFP, a novel translocation partner gene of HMGIC in a lipoma, is a member of a new family of LHFP-like genes. Genomics 57: 438-441, 1999.
[8234] 2348. Nishita, Y.; Yoshida, I.; Sado, T.; Takagi, N.: Genomic imprinting and chromosomal localization of the human MEST gene. Genomics 36:539-542, 1996.
[8235] 2349. Orso, E.; Broccardo, C.; Kaminski, W. E.; Bottcher, A.; Liebisch, G.; Drobnik, W.; Gotz, A.; Chambenoit, O.; Diederich, W.; Langmann, T.; Spruss, T.; Luciani, M.-F.; Rothe, G.; Lackner, K. J.; Chimini, G.; Schmitz, G.: Transport of lipids from Golgi to plasma membrane is defective in Tangier disease patients and Abcl-deficient mice. Nature Genet. 24: 192-196, 2000.
[8236] 2350. Ahrendt, S. A.; Decker, P. A.; Alawi, E. A.; Zhu, Y.; Sanchez-Cespedes, M.; Yang, S. C.; Haasler, G. B.; Kajdacsy-Balla, A.; Demeure, M. J.; Sidransky, D.: Cigarette smoking is strongly associated with mutation of the K-ras gene in patients with primary adenocarcinoma of the lung. Cancer 92:1525-1530, 2001.
[8237] 2351. Almoguera, C.; Shibata, D.; Forrester, K.; Martin, J.; Arnheim, N.; Perucho, M.: Most human carcinomas of the exocrine pancreas contain mutant c-K-ras genes. Cell 53: 549-554, 1988.
[8238] 2352. Andreyev, H. J. N.; Tilsed, J. V. T.; Cunningham, D.; Sampson, S. A.; Norman, A. R.; Schneider, H. J.; Clarke, P. A.: K-ras mutations in patients with early colorectal cancers. Gut 41: 323-329, 1997.
[8239] 2353. Bollag, G.; Adler, F.; elMasry, N.; McCabe, P. C.; Connor, E. Jr.; Thompson, P.; McCormick, F.; Shannon, K.: Biochemical characterization of a novel KRAS insertion mutation from a human leukemia. J. Biol. Chem. 271: 32491-32494, 1996.
[8240] 2354. Burmer, G. C.; Loeb, L. A.: Mutations in the KRAS2 oncogene during progressive stages of human colon carcinoma. Proc. Nat. Acad. Sci. 86:2403-2407, 1989.
[8241] 2355. Capon, D. J.; Seeburg, P. H.; McGrath, J. P.; Hayflick, J. S.; Edman, U.; Levinson, A. D.; Goeddel, D. V.: Activation of Ki-ras2 gene in human colon and lung carcinomas by two different point mutations. Nature 304:507-513, 1983.
[8242] 2356. Cubilla, A. L.; Fitzgerald, P. J.: Cancer Res. 36: 2690-2698, 1976.
[8243] 2357. Der, C. J.; Cooper, G. M.: Altered gene products are associated with activation of cellular ras-k genes in human lung and colon carcinomas. Cell 32:201-208, 1983.
[8244] 2358. Feig, L. A.; Bast, R. C., Jr.; Knapp, R. C.; Cooper, G. M.: Somatic activation of ras-K gene in a human ovarian carcinoma. Science 223:698-701, 1984.
[8245] 2359. Grimmond, S. M.; Raghavan, D.; Russell, P. J.: Detection of arare point mutation in Ki-ras of a human bladder cancer xenograft by polymerase chain reaction and direct sequencing. Urol. Res. 20:121-126, 1992.
[8246] 2360. Hayashi, N.; Sugai, S.; Ito, I.; Nakamori, S.; Ogawa, M.; Nakamura, Y.: Ethnic difference in the pattern of K-ras oncogene mutations in human colorectal cancers. Hum. Mutat. 8: 258-261, 1996.
[8247] 2361. Marx, S. O.; Reiken, S.; Hisamatsu, Y.; Jayaraman, T.; Burkhoff, D.; Rosemblit, N.; Marks, A. R.: PKA phosphorylation dissociates FKBP12.6 from the calcium release channel (ryanodine receptor): defective regulation in failing hearts. Cell 101: 365-376, 2000.
[8248] 2362. Albrecht, B.; Weber, K.; Pongs, O.: Characterization of a voltage-activated K-channel gene cluster on human chromosome 12p13. Receptors Channels 3:213-220, 1995.
[8249] 2363. Grupe, A.; Schroter, K. H.; Ruppersberg, J. P.; Stocker, M.; Drewes, T.; Beckh, S.; Pongs, O.: Cloning and expression of a human voltage-gated potassium channel: a novel member of the RCK potassium channel family. EMBO J. 9: 1749-1756, 1990.
[8250] 2364. Klocke, R.; Roberds, S. L.; Tamkun, M. M.; Gronemeier, M.; Augustin, A.; Albrecht, B.; Pongs, O.; Jockusch, H.: Chromosomal mapping in the mouse of eight K(+)-channel genes representing the four Shaker-like subfamilies Shaker, Shab, Shaw, and Shal. Genomics 18: 568-574, 1993.
[8251] 2365. Kiefer, M. C.; Tucker, J. E.; Joh, R.; Landsberg, K. E.; Saltman, D.; Barr, P. J.: Identification of a second human subtilisin-like protease gene in the fes/fps region of chromosome 15. DNA Cell Biol. 10:757-769, 1991.
[8252] 2366. Orth, K.; Palmer, L. E.; Bao, Z. Q.; Stewart, S.; Rudolph, A. E.; Bliska, J. B.; Dixon, J. E.: Inhibition of the mitogen-activated protein kinase kinase superfamily by a Yersinia effector. Science 285:1920-1923, 1999.
[8253] 2367. Rampoldi, L.; Zimbello, R.; Bortoluzzi, S.; Tiso, N.; Valle, G.; Lanfranchi, G.; Danieli, G. A.: Chromosomal localization of four MAPK signaling cascade genes: MEK1, MEK3, MEK4 and MEKK5. Cytogenet. Cell Genet. 78: 301-303, 1997.
[8254] 2368. Collu, R.; Tang, J.; Castagne, J.; Lagace, G.; Masson, N.; Huot, C.; Deal, C.; Delvin, E.; Faccenda, E.; Eidne, K. A.; Van Vliet, G.: A novel mechanism for isolated central hypothyroidism: inactivating mutations in the thyrotropin-releasing hormone receptor gene. J. Clin. Endocr. Metab. 82: 1361-1365, 1997.
[8255] 2369. Katsanis, N.; Fitzgibbon, J.; Fisher, E. M. C.: Paralogy mapping: identification of a region in the human MHC triplicated onto human chromosomes 1 and 9 allows the prediction and isolation of novel PBX and NOTCH loci. Genomics 35: 101-108, 1996.
[8256] 2370. Rohen, C.; Caselitz, J.; Stern, C.; Wanschura, S.; Schoenmakers, E. F.; Van de Ven, W. J.; Barnitzke, S.; Bullerdiek, J.: A hamartoma of the breast with an aberration of 12q mapped to the MAR region by fluorescence in situ hybridization. Genes Chromosomes Cancer 84:82-84, 1995.
[8257] 2371. Schoenmakers, E. F. P. M.; Huysmans, C.; Van de Ven, W. J. M.: Allelic knockout of novel splice variants of human recombination repair gene RAD51B in t(12;14) uterine leiomyomas. Cancer Res. 59:19-23, 1999.
[8258] 2372. Zhou, X.; Benson, K. F.; Ashar, H. R.; Chada, K.: Mutation responsible for the mouse pygmy phenotype in the developmentally regulated factor HMGI-C. Nature 377: 771-774, 1995.
[8259] 2373. Holash, J.; Maisonpierre, P. C.; Compton, D.; Boland, P.; Alexander, C. R.; Zagzag, D.; Yancopoulos, G. D.; Wiegand, S. J.: Vessel cooption, regression, and growth in tumors mediated by angiopoietins and VEGF. Science 284:1994-1998, 1999.
[8260] 2374. Th u rston, G.; Su ri, C.; Smith, K.; McClai n, J.; Sato, T. N.; Yancopoulos, G. D.; McDonald, D. M.: Leakage-resistant blood vessels in mice transgenically overexpressing angiopoietin-1. Science 286: 2511-2514, 1999.
[8261] 2375. Rampoldi, L.; Dobson-Stone, C.; Rubio, J. P.; Danek, A.; Chalmers, R. M.; Wood, N. W.; Verellen, C.; Ferrer, X.; Malandrini, A.; Fabrizi, G. M.; Brown, R.; Vance, J.; Pericak-Vance, M.; Rudolf, G.; Carre, S.; Alonso, E.; Manfredi, M.; Nemeth, A. H.; Monaco, A. P.: A conserved sorting-associated protein is mutant in chorea-acanthocytosis. Nature Genet. 28: 119-120, 2001.
[8262] 2376. Wong-Staal, F.; Dalla-Favera, R.; Franchini, G.; Gelmann, E. P.; Gallo, R. C.: Three distinct genes in human DNA related to the transforming genes of mammalian sarcoma retroviruses. Science 213: 226-228, 1981.
[8263] 2377. Aurias, A.; Rimbaut, C.; Buffe, D.; Dubousset, J.; Mazabraud, A.: Chromosomal translocations in Ewing's sarcoma. (Letter) New Eng. J. Med. 309: 496-497, 1983.
[8264] 2378. Bartram, C. R.; de Klein, A.; Hagemeijer, A.; Grosveld, G.; Heisterkamp, N.; Groffen, J.: Localization of the human c-sis oncogene in Ph-1-positive and Ph-1-negative chronic myelocytic leukemia by in situ hybridization. Blood 63:223-225, 1984.
[8265] 2379. Bechet, J.-M.; Bornkamm, G.; Freese, U.-K.; Lenoir, G. M.: Thec-sis oncogene is not activated in Ewing's sarcoma. (Letter) New Eng. J. Med. 310: 393 only, 1984.
[8266] 2380. Bishop, J. M.: Enemies within: the genesis of retrovirus oncogenes. Cell 23:5-6, 1981.
[8267] 2381. Bolger, G. B.; Stamberg, J.; Kirsch, I. R.; Hollis, G. F.; Schwarz, D. F.; Thomas, G. H.: Chromosomal translocation t(14;22) and oncogene (c-sis) variant in a pedigree with familial meningioma. New Eng. J. Med. 312: 564-567, 1985.
[8268] 2382. Cohen, J. B.; Levinson, A. D.: A point mutation in the last intron responsible for increased expression and transforming activity of the c-Ha-ras oncogene. Nature 334: 119-124, 1988.
[8269] 2383. Collins, T.; Ginsburg, D.; Boss, J. M.; Orkin, S. H.; Pober, J. S.: Cultured human endothelial cells express platelet-derived growth factor B chain: cDNA cloning and structural analysis. Nature 316:748-750, 1985.
[8270] 2384. Dalla-Favera, R.; Gallo, R. C.; Giallongo, A.; Croce, C.: Chromosomal localization of the human homolog (c-sis) of the simian sarcoma virusonc gene. Science 218: 686-688, 1982.
[8271] 2385. Dalla-Favera, R.; Gelmann, E. P.; Gallo, R. C.; Wong-Staal, F.: A human onc gene homologous to the transforming gene (v-sis) of simian sarcoma virus. Nature 292: 31-35, 1981.
[8272] 2386. Deuel, T. F.; Huang, J. S.; Huang, S. S.; Stroobant, P.; Waterfield, M. D.: Expression of a platelet-derived growth factor-like protein in simian sarcoma virus transformed cells. Science 221: 1348-1350, 1983.
[8273] 2387. Devare, S. G.; Reddy, E. P.; Law, J. D.; Robbins, K. C.; Aaronson, S. A.: Nucleotide sequence of the simian sarcoma virus genome: demonstration that its acquired cellular sequences encode the transforming gene product p28-sis. Proc. Nat. Acad. Sci. 80: 731-735, 1983.
[8274] 2388. Benson, K. F.; Horwitz, M.; Wolff, J.; Friend, K.; Thompson, E.; White, S.; Richards, R. I.; Raskind, W. H.; Bird, T. D.: CAG repeat expansion in autosomal dominant familial spastic paraparesis: novel expansion in a subset of patients. Hum. Molec. Genet. 7: 1779-1786, 1998.
[8275] 2389. Fonknechten, N.; Mavel, D.; Byrne, P.; Davoine, C.-S.; Cruaud, C.; Boentsch, D.; Samson, D.; Coutinho, P.; Hutchinson, M.; McMonagle, P.; Burgunder, J.-M.; Tartaglione, A.; and 10 others: Spectrum of SPG4 mutations in autosomal dominant spastic paraplegia. Hum. Molec. Genet. 9: 637-644, 2000.
[8276] 2390. Nielsen, J. E.; Koefoed, P.; Abell, K.; Hasholt, L.; Eiberg, H.; Fenger, K.; Niebuhr, E.; Sorensen, S. A.: CAG repeat expansion in autosomal dominant pure spastic paraplegia linked to chromosome 2p21-p24. Hum. Molec. Genet. 6: 1811-1816, 1997.
[8277] 2391. Svenson, I. K.; Ashley-Koch, A. E.; Gaskell, P. C.; Riney, T. J.; Cumming, W. J. K.; Kingston, H. M.; Hogan, E. L.; Boustany, R.-M. N.; Vance, J. M.; Nance, M. A.; Pericak-Vance, M. A.; Marchuk, D. A.: Identification and expression analysis of spastin gene mutations in hereditary spastic paraplegia. Am. J. Hum. Genet. 68: 1077-1085, 2001.
[8278] 2392. Asch, A. S.; Barnwell, J.; Silverstein, R. L.; Nachman, R. L.: Isolation of the thrombospondin membrane receptor. J. Clin. Invest. 79:1054-1061, 1987.
[8279] 2393. de Fraipont, F.; El Atifi, M.; Gicquel, C.; Bertagna, X.; Chambaz, E. M.; Feige, J. J.: Expression of the angiogenesis markers vascular endothelial growth factor-A, thrombospondin-1, and platelet-derived endothelial cell growth factor in human sporadic adrenocortical tumors: correlation with genotypic alterations. J. Clin. Endocr. Metab. 85:4734-4741, 2000.
[8280] 2394. Dixit, V. M.; Hennessy, S. W.; Grant, G. A.; Rotwein, P.; Frazier, W. A.: Characterization of a cDNA encoding the heparin and collagen binding domains of human thrombospondin. Proc. Nat. Acad. Sci. 83:5449-5453, 1986.
[8281] 2395. Frazier, W. A.: Thrombospondin: a modular adhesive glycoprotein of platelets and nucleated cells. J. Cell Biol. 105: 625-632, 1987.
[8282] 2396. Jaffe, E.; Bornstein, P.; Disteche, C. M.: Mapping of the thrombospondin gene to human chromosome 15 and mouse chromosome 2 by in situ hybridization. Genomics 7:123-126, 1990.
[8283] 2397. Lawler, J.; Sunday, M.; Thibert, V.; Duquette, M.; George, E. L.; Rayburn, H.; Hynes, R. O.: Thrombospondin-1 is required for normal murine pulmonary homeostasis and its absence causes pneumonia. J. Clin. Invest. 101: 982-992, 1998.
[8284] 2398. Rodriguez-Manzaneque, J. C.; Lane, T. F.; Ortega, M. A.; Hynes, R. O.; Lawler, J.; Iruela-Arispe, M. L.: Thrombospondin-1 suppresses spontaneous tumor growth and inhibits activation of matrix metalloproteinase-9 and mobilization of vascular endothelial growth factor. Proc. Nat. Acad. Sci. 98: 12485-12490, 2001.
[8285] 2399. Wolf, F. W.; Eddy, R. L.; Shows, T. B.; Dixit, V. M.: Structure and chromosomal localization of the human thrombospondin gene. Genomics 6:685-691, 1990.
[8286] 2400. Peter, D.; Finn, J. P.; Klisak, I.; Liu, Y.; Kojis, T.; Heinzmann, C.; Roghani, A.; Sparkes, R. S.; Edwards, R. H.: Chromosomal localization of the human vesicular amine transporter genes. Genomics 18: 720-723, 1993.
[8287] 2401. Roghani, A.; Welch, C.; Xia, Y.-R.; Liu, Y.; Peter, D.; Finn, J. P.; Edwards, R. H.; Lusis, A. J.: Assignment of the mouse vesicular monoamine transporter genes, Slcl8a1 and Scl8a2, to chromosomes 8 and 19 by linkage analysis. Mammalian Genome 7: 393-394, 1996.
[8288] 2402. Elchebly, M.; Payette, P.; Michaliszyn, E.; Cromlish, W.; Collins, S.; Loy, A. L.; Normandin, D.; Cheng, A.; Himms-Hagen, J.; Chan, C.-C.; Ramachandran, C.; Gresser, M. J.; Tremblay, M. L.; Kennedy, B. P.: Increased insulin sensitivity and obesity resistance in mice lackingthe protein tyrosine phosphatase-1B gene. Science 283: 1544-1548, 1999.
[8289] 2403. Forsell, P. K. A. L.; Boie, Y.; Montalibet, J.; Collins, S.; Kennedy, B. P.: Genomic characterization of the human and mouse protein tyrosine phosphatase-1B genes. Gene 260: 145-153, 2000.
[8290] 2404. Gu, H. F.; Almgren, P.; Lindholm, E.; Frittitta, L.; Pizzuti, A.; Trischitta, V.; Groop, L. C.: Association between the human glycoprotein PC-1 gene and elevated glucose and insulin levels in paired-sibling analysis. Diabetes 49: 1601-1603, 2000.
[8291] 2405. Haj, F. G.; Verveer, P. J.; Squire, A.; Neel, B. G.; Bastiaens, P. I. H.: Imaging sites of receptor dephosphorylation by PTP1B on the surface of the endoplasmic reticulum. Science 295: 1708-1711, 2002.
[8292] 2406. Jia, Z.; Barford, D.; Flint, A. J.; Tonks, N. K.: Structural basis for phosphotyrosine peptide recognition by protein tyrosine phosphatase 1B. Science 268: 1754-1758, 1995.
[8293] 2407. Kennedy, B. P.; Ramachandran, C.: Protein tyrosine phosphatase-1B in diabetes. Biochem. Pharm. 60: 877-883, 2000.
[8294] 2408. Mok, A.; Cao, H.; Zinman, B.; Hanley, A. J. G.; Harris, S. B.; Kennedy, B. P.; Hegele, R. A.: A single nucleotide polymorphism in protein tyrosine phosphatase PTP-1B is associated with protection from diabetes or impaired glucose tolerance in Oji-Cree. J. Clin. Endocr. Metab. 87: 724-727, 2002.
[8295] 2409. Tonks, N. K.; Diltz, C. D.; Fischer, E. H.: Purification of the major protein-tyrosine-phosphatases of human placenta. J. Biol. Chem. 263:6722-6730, 1988.
[8296] 2410. Chan, J. Y.; Cheung, M.-C.; Moi, P.; Chan, K.; Kan, Y. W.: Chromosomal localization of the human NF-E2 family of bZIP transcription factors by fluorescence in situ hybridization. Hum. Genet. 95: 265-269, 1995.
[8297] 2411. Chan, J. Y.; Han, X.-L.; Kan, Y. W.: Cloning of Nrf1, an NF-E2-related transcription factor, by genetic selection in yeast. Proc. Nat. Acad. Sci. 90: 11371-11375, 1993.
[8298] 2412. Chan, J. Y.; Kwong, M.; Lu, R.; Chang, J.; Wang, B.; Yen, T. S. B.; Kan, Y. W.: Targeted disruption of the ubiquitous CNC-bZIP transcription factor, Nrf-1, results in anemia and embryonic lethality in mice. EMBO J. 17: 1779-1787, 1998.
[8299] 2413. Luna, L.; Johnsen, O.; Skartlien, A.; Pedeutour, F.; Turc-Carel, C.; Prydz, H.; Kolsto, A.-B.: Molecular cloning of a putative novel human bZIP transcription factor on chromosome 17q22. Genomics 22:553-562, 1994.
[8300] 2414. Luna, L.; Johnsen, O.; Skartlien, A. H.; Pedeutour, F.; Turc-Carel, C.; Prydz, H.; Kolsto, A.-B.: Molecular cloning of a putative novel human bZIP transcription factor on chromosome 17q22. Genomics 22:553-562, 1994.
[8301] 2415. McKie, J.; Johnstone, K.; Mattei, M.-G.; Scambler, P.: Cloning and mapping of murine Nfe2I1. Genomics 25: 716-719, 1995.
[8302] 2416. McKie, J.; Scambler, P. J.: The Nfe2I1 gene maps to distal mouse chromosome 11. Mammalian Genome 7: 89-90, 1996.
[8303] 2417. Liu, P.; Wakamiya, M.; Shea, M. J.; Albrecht, U.; Behringer, R. R.; Bradley, A.: Requirement for Wnt3 in vertebrate axis formation. Nature Genet. 22: 361-365, 1999.
[8304] 2418. Rider, S. H.; Gorman, P. A.; Shipley, J.; Roeling, H.; Nusse, R.; Xu, W.; Sheer, D.; Solomon, E.: Localisation of the human int-4 (INT4) gene. (Abstract) Cytogenet. Cell Genet. 51: 1066 only, 1989.
[8305] 2419. Roelink, H.; Wang, J.; Black, D. M.; Solomon, E.; Nusse, R.: Molecular cloning and chromosomal localization to 17q21 of the human WNT3 gene. Genomics 17:790-792, 1993.
[8306] 2420. Lossie, A. C.; Gordon, D. F.; Camper, S. A.: Localization of thyrotropin-releasing hormone receptor and thyrotroph embryonic factor on mouse chromosome 15. Mammalian Genome 4: 621-623, 1993.
[8307] 2421. Matre, V.; Karlsen, H. E.; Wright, M. S.; Lundell, I.; Fjeldheim, A. K.; Gabrielsen, O. S.; Larhammar, D.; Gautvik, K. M.: Molecular cloning of a functional human thyrotropin-releasing hormone receptor. Biochem. Biophys. Res. Commun. 195: 179-185, 1993.
[8308] 2422. Morrison, N.; Duthie, S. M.; Boyd, E.; Eidne, K. A.; Connor, J. M.: Assignment of the gene encoding the human thyrotropin-releasing hormone receptor to 8q23 by fluorescence in situ hybridization. Hum. Genet. 93: 716-718, 1994.
[8309] 2423. Straub, R. E.; Frech, G. C.; Joho, R. H.; Gershengorn, M. C.: Expression cloning of a cDNA encoding the mouse pituitary thyrotropin-releasing hormone receptor. Proc. Nat. Acad. Sci. 87: 9514-9518, 1990.
[8310] 2424. Yamada, M.; Monden, T.; Konaka, S.; Mori, M.: Assignment of human thyrotropin-releasing hormone (TRH) receptor gene to chromosome 8. Somat. Cell Molec. Genet. 19: 577-580, 1993.
[8311] 2425. Zhao, D.; Yang, J.; Jones, K. E.; Gerald, C.; Suzuki, Y.; Hogan, P. G.; Chin, W. W.; Tashjian, A. H., Jr.: Molecular cloning of a complementary deoxyribonucleic acid encoding the thyrotropin-releasing hormone receptor and regulation of its messenger ribonucleic acidin rat GH cells. Endocrinology 130: 3529-3536, 1992.
[8312] 2426. Brennan, T. J.; Seeley, W. W.; Kilgard, M.; Schreiner, C. E.; Tecott, L. H.: Sound-induced seizures in serotonin 5-HT-2C receptor mutant mice. Nature Genet. 16: 387-390, 1997.
[8313] 2427. Gurevich, I.; Tamir, H.; Arango, V.; Dwork, A. J.; Mann, J. J.; Schmauss, C.: Altered editing of serotonin 2C receptor pre-mRNA in the prefrontal cortex of depressed suicide victims. Neuron 34: 349-356, 2002.
[8314] 2428. Hall, C. S.: Genetic differences in fatal audiogenic seizures: between two inbred strains of house mice. J. Hered. 38: 3-6, 1947.
[8315] 2429. Lappalainen, J.; Zhang, L.; Dean, M.; Oz, M.; Ozaki, N.; Yu, D.; Virkkunen, M.; Weight, F.; Linnoila, M.; Goldman, D.: Identification, expression, and pharmacology of a cys(23)-ser(23) substitution in the human 5-HT(2C) receptor gene (HTR2C). Genomics 27: 274-279, 1995.
[8316] 2430. Milatovich, A.; Hsieh, C.-L.; Bonaminio, G.; Tecott, L.; Julius, D.; Francke, U.: Serotonin receptor 1c gene assigned to X chromosomein human (band q24) and mouse (bands D-F4). Hum. Molec. Genet. 1:681-684, 1992.
[8317] 2431. Tecott, L. H.; Sun, L. M.; Akana, S. F.; Strack, A. M.; Lowenstein, D. H.; Dallman, M. F.; Julius, D.: Eating disorder and epilepsy in mice lacking 5-HT2C serotonin receptors. Nature 374: 542-546, 1995.
[8318] 2432. Prakash, S. K.; Paylor, R.; Jenna, S.; Lamarche-Vane, N.; Armstrong, D. L.; Xu, B.; Mancini, M. A.; Zoghbi, H. Y.: Functional analysis of ARHGAP6, a novel GTPase-activating protein for RhoA. Hum. Molec. Genet. 9: 477-488, 2000.
[8319] 2433. Schaefer, L.; Prakash, S.; Zoghbi, H. Y.: Cloning and characterization of a novel rho-type GTPase-activating protein gene (ARHGAP6) from the critical region for microphthalmia with linear skin defects. Genomics 46:268-277, 1997.
[8320] 2434. Aman, M. J.; Tayebi, N.; Obiri, N. I.; Puri, R. K.; Modi, W. S.; Leonard, W. J.: cDNA cloning and characterization of the human interleukin 13 receptor alpha chain. J. Biol. Chem. 271: 29265-29270, 1996.
[8321] 2435. Guo, J.; Apiou, F.; Mellerin, M.-P.; Lebeau, B.; Jacques, Y.; Minvielle, S.: Chromosome mapping and expression of the human interleukin-13 receptor. Genomics 42: 141-5, 1997.
[8322] 2436. Hilton, D. J.; Zhang, J.-G.; Metcalf, D.; Alexander, W. S.; Nicola, N. A.; Willson, T. A.: Cloning and characterization of a binding subunit of the interleukin 13 receptor that is also a component of the interleukin 4 receptor. Proc. Nat. Acad. Sci. 93: 497-501, 1996.
[8323] 2437. Kleijnen, M. F.; Shih, A. H.; Zhou, P.; Kumar, S.; Soccio, R. E.; Kedersha, N. L.; Gill, G.; Howley, P. M.: The hPLIC proteins mayprovide a link between the ubiquitination machinery and the proteasome. Molec. Cell 6: 409-419, 2000.
[8324] 2438. Riesewijk, A. M.; Blagitko, N.; Schinzel, A. A.; Hu, L.; Schulz, U.; Hamel, B. C. J.; Ropers, H.-H.; Kalscheuer, V. M.: Evidence against a major role of PEG1/MEST Silver-Russell syndrome. Europ. J. Hum. Genet. 6: 114-120, 1998.
[8325] 2439. Riesewijk, A. M.; Hu, L.; Schulz, U.; Tariverdian, G.; Hoglund, P.; Kere, J.; Ropers, H.-H.; Kalscheuer, V. M.: Monoallelic expression of human PEG1/MEST is paralleled by parent-specific methylation infetuses. Genomics 42: 236-244, 1997.
[8326] 2440. Sado, T.; Nakajima, N.; Tada, M.; Takagi, N.: A novel mesoderm-specific cDNA isolated from a mouse embryonal carcinoma cell line. Dev. Growth Differ. 35: 551-560, 1993.
[8327] 2441. Jayakumar, A.; Chirala, S. S.; Chinault, A. C.; Baldini, A.; Abu-Elheiga, L.; Wakil, S. J.: Isolation and chromosomal mapping of genomic clones encoding the human fatty acid synthase gene. Genomics 23: 420-424, 1994.
[8328] 2442. Jayakumar, A.; Tai, M.-H.; Huang, W.-Y.; Al-Feel, W.; Hsu, M.; Abu-Elheiga, L.; Chirala, S. S.; Wakil, S. J.: Human fatty acid synthase: properties and molecular cloning. Proc. Nat. Acad. Sci. 92: 8695-8699, 1995.
[8329] 2443. Loftus, T. M.; Jaworsky, D. E.; Frehywot, G. L.; Townsend, C. A.; Ronnett, G. V.; Lane, M. D.; Kuhajda, F. P.: Reduced food intake and body weight in mice treated with fatty acid synthase inhibitors. Science 288:2379-2381, 2000.
[8330] 2444. Wakil, S. J.: Fatty acid synthase, a proficient multifunctional enzyme. Biochemistry 28: 4523-4530, 1989.
[8331] 2445. Ye, Q.; Chung, L. W. K.; Li, S.; Zhau, H. E.: Identification of a novel FAS/ER-alpha fusion transcript expressed in human cancer cells. Biochim. Biophys. Acta 1493: 373-377, 2000.
[8332] 2446. Hansen, J. J.; Durr, A.; Cournu-Rebeix, I.; Georgopoulos, C.; Ang, D.; Nielsen, M. N.; Davoine, C.-S.; Brice, A.; Fontaine, B.; Gregersen, N.; Bross, P.: Hereditary spastic paraplegia SPG13 is associated with a mutation in the gene encoding the mitochondrial chaperonin Hsp60. Am. J. Hum. Genet. 70: 1328-1332, 2002.
[8333] 2447. Todd, M. J.; Viitanen, P. V.; Lorimer, G. H.: Dynamics of the chaperonin ATPase cycle: implications for facilitated protein folding. Science 265:659-666, 1994.
[8334] 2448. Di Paola, R.; Frittitta, L.; Miscio, G.; Bozzali, M.; Baratta, R.; Centra, M.; Spampinato, D.; Santagati, M. G.; Ercolino, T.; Cisternino, C.; Soccio, T. Mastroianno, S.; Tassi, V.; Almgren, P.; Pizzuti, A.; Vigneri, R.; Trischitta, V.: A variation in 3-prime UTR of hPTP1B increases specific gene expression and associates with insulin resistance. Am. J. Hum. Genet. 70: 806-812, 2002.
[8335] 2449. Eidne, K.; Taylor, P.; Connor, M.; Duthie, S.: Isolation, characterization and chromosomal localization of the human thyrotropin releasing hormone receptor. (Abstract) 75th Annual Meeting of the Endocr. Soc. 437 only, 1993.
[8336] 2450. Gedde-Dahl, T., Jr.; Olaisen, B.; Teisberg, P.; Wilhelmy, M. C.; Mevag, B.; Helland, R.: The locus for apolipoprotein E (apoE) is close to the Lutheran (Lu) blood group locus on chromosome 19. Hum. Genet. 67: 178-182, 1984.
[8337] 2451. Ogasawara, M.; Kim, S.-C.; Adamik, R.; Togawa, A.; Ferrans, V. J.; Takeda, K.; Kirby, M.; Moss, J.; Vaughan, M.: Similarities in function and gene structure of cytohesin-4 and cytohesin-1, guanine nucleotide-exchange proteins for ADP-ribosylation factors. J. Biol. Chem. 275: 3221-3230, 2000.
[8338] 2452. Helwig, U.; Imai, K.; Schmahl, W.; Thomas, B. E.; Varnum, D. S.; Nadeau, J. H.; Balling, R.: Interaction between undulated and Patchleads to an extreme form of spina bifida in double-mutant mice. Nature Genet. 11: 60-63, 1995.
[8339] 2453. Barnett, T.; Pickle, W., II; Rae, P. M. M.; Hart, J.; Kamarck, M.; Elting, J.: Pregnancy-specific beta-1-glycoproteins are related to carcinoembryonic antigens and map to chromosome 19. (Abstract) Cytogenet. Cell Genet. 51: 958, 1989.
[8340] 2454. Barnett, T. R.; Pickle, W., II; Rae, P. M. M.; Hart, J.; Kamarck, M.; Elting, J.: Human pregnancy-specific beta(1)-glycoproteins are coded within chromosome 19. Am. J. Hum. Genet. 44: 890-893, 1989.
[8341] 2455. Bartels, I.; Lindemann, A.: Maternal levels of pregnancy-specificbeta-1-glycoprotein (SP-1) are elevated in pregnancies affected by Down's syndrome. Hum. Genet. 80: 46-48, 1988.
[8342] 2456. Brandriff, B. F.; Gordon, L. A.; Tynan, K. T.; Olsen, A. S.; Mohrenweiser, H. W.; Fertitta, A.; Carrano, A. V.; Trask, B. J.: Order and genomic distances among members of the carcinoembryonic antigen (CEA) gene family determined by fluorescence in situ hybridization. Genomics 12:773-779, 1992.
[8343] 2457. Chan, W.-Y.; Qiu, W.-R.: Human pregnancy-specific beta-1 glycoproteinis encoded by multiple genes localized on two chromosomes. Am. J. Hum. Genet. 43: 152-159, 1988.
[8344] 2458. Khan, W. N.; Teglund, S.; Bremer, K.; Hammarstrom, S.: The pregnancy-specific glycoprotein family of the immunoglobulin superfamily: identification of new members and estimation of family size. Genomics 12: 780-787, 1992.
[8345] 2459. Niemann, S. C.; Flake, A.; Bohn, H.; Bartels, I.: Pregnancy-specificbeta-1-glycoprotein: cDNA cloning, tissue expression, and species specificity of one member of the PSBG family. Hum. Genet. 82: 239-243, 1989.
[8346] 2460. Niemann, S. C.; Schonk, D.; van Dijk, P.; Wieringa, B.; Grzeschik, K.-H.; Bartels, I.: Regional localization of the gene encoding pregnancy specific beta-1-glycoprotein 1 (PSBG1) to human chromosome 19q13.1. Cytogenet. Cell Genet. 52: 95-97, 1989.
[8347] 2461. Niemann, S. C.; Schonk, D.; van Dijk, P. E.; Grzeschik, K.-H.; Bartels, I.: Chromosomal assignment of a cDNA clone encoding pregnancy-specific beta-1-glycoprotein to chromosome 19. (Abstract) Cytogenet. Cell Genet. 51: 1053, 1989.
[8348] 2462. Olsen, A.; Teglund, S.; Nelson, D.; Gordon, L.; Copeland, A.; Georgescu, A.; Carrano, A.; Hammarstrom, S.: Gene organization of the pregnancy-specific glycoprotein region on human chromosome 19: assembly and analysis of a 700-kb cosmid contig spanning the region. Genomics 23:659-668, 1994.
[8349] 2463. Streydio, C.; Swillens, S.; Georges, M.; Szpirer, C.; Vassart, G.: Structure, evolution and chromosomal localization of the human pregnancy-specific beta-1 glycoprotein gene family. Genomics 6:579-592, 1990. Note: Erraturn: Genomics 7: 661-662, 1990.
[8350] 2464. Teglund, S.; Olsen, A.; Khan, W. N.; Frangsmyr, L.; Hammarstrom, S.: The pregnancy-specific glycoprotein (PSG) gene cluster on human chromosome 19: fine structure of the 11 PSG genes and identification of 6 new genes forming a third subgroup within the carcinoembryonicantigen (CEA) family. Genomics 23: 669-684, 1994.
[8351] 2465. Thompson, J.; Koumari, R.; Wagner, K.; Barnert, S.; Schleussner, C.; Schrewe, H.; Zimmermann, W.; Muller, G.; Schempp, W.; Zaninetta, D.; Ammaturo, D.; Hardman, N.: The human pregnancy-specific glycoproteingenes are tightly linked on the long arm of chromosome 19 and are-coordinately expressed. Biochem. Biophys. Res. Commun. 167: 848-859, 1990.
[8352] 2466. Watanabe, S.; Chou, J. Y.: Isolation and characterization of complementary DNAs encoding human pregnancy-specific beta-1-glycoprotein. J. Biol. Chem. 263: 2049-2054, 1988.
[8353] 2467. Olsen, A.; Teglund, S.; Nelson, D.; Gordon, L.; Copeland, A.; Georgescu, A.; Carrano, A.; Hammarstrom, S.: Gene organization of the pregnancy-specific glycoprotein region on human chromosome 19: assembly and analysis of a 700-kb cosmid contig spanning the region. Genomics 23: 659-668, 1994.
[8354] 2468. Thompson, J.; Zimmermann, W.; Osthus-Bugat, P.; Schleussner, C.; Eades-Perner, A.-M.; Barnert, S.; von Kleist, S.; Willcocks, T.; Craig, I.; Tynan, K.; Olsen, A.; Mohrenweiser, H.: Long-range chromosomal mapping of the carcinoembryonic antigen (CEA) gene family cluster. Genomics 12:761-772, 1992.
[8355] 2469. Tynan, K.; Olsen, A.; Trask, B.; de Jong, P.; Thompson, J.; Zimmermann, W.; Carrano, A.; Mohrenweiser, H.: Assembly and analysis of cosmid contigs in the CEA-gene family region of human chromosome 19. Nucleic Acids Res. 20: 1629-1636, 1992.
[8356] 2470. Nobukuni, Y.; Watanabe, A.; Takeda, K.; Skarka, H.; Tachibana, M.: Analyses of loss-of-function mutations of the MITF gene suggest that haploin sufficiency is a cause of Waardenburg syndrome type 2A. Am. J. Hum. Genet. 59: 76-83, 1996.
[8357] 2471. Steingrimsson, E.; Moore, K. J.; Lamoreux, M. L.; Ferre-D'Amare, A. R.; Burley, S. K.; Sanders Zimring, D. C.; Skow, L. C.; Hodgkinson, C. A.; Arnheiter, H.; Copeland, N. G.; Jenkins, N. A.: Molecular basis of mouse microphthalmia (mi) mutations helps explain their developmental and phenotypic consequences. Nature Genet. 8: 256-263, 1994.
[8358] 2472. Steingrimsson, E.; Tessarollo, L.; Pathak, B.; Hou, L.; Arnheiter, H.; Copeland, N. G.; Jenkins, N. A.: Mitf and Tfe3, two members of the Mitf-Tfe family of bHLH-Zip transcription factors, have important but functionally redundant roles in osteoclast development. Proc. Nat. Acad. Sci. 99: 4477-4482, 2002.
[8359] 2473. Tachibana, M.; Perez-Jurado, L. A.; Nakayama, A.; Hodgkinson, C. A.; Li, X.; Schneider, M.; Miki, T.; Fex, J.; Francke, U.; Arnheiter, H.: Cloning of MITF, the human homolog of the mouse microphthalmia gene and assignment to chromosome 3p14.1-p12.3. Hum. Molec. Genet. 3:553-557, 1994.
[8360] 2474. Tachibana, M.; Takeda, K.; Nobukuni, Y.; Urabe, K.; Long, J. E.; Meyers, K. A.; Aaronson, S. A.; Miki, T.: Ectopic expression of MITF, a gene for Waardenburg syndrome type 2, converts fibroblasts to cells with melanocytes characteristics. Nature Genet. 14: 50-54, 1996.
[8361] 2475. Takeda, K.; Takemoto, C.; Kobayashi, I.; Watanabe, A.; Nobukuni, Y.; Fisher, D. E.; Tachibana, M.: Ser298 of MITF, a mutation sitein Waardenburg syndrome type 2, is a phosphorylation site with functional significance. Hum. Molec. Genet. 9: 125-132, 2000.
[8362] 2476. Tassabehji, M.; Newton, V. E.; Read, A. P.: Waardenburg syndrometype 2 caused by mutations in the human microphthalmia (MITF) gene. Nature Genet. 8: 251-255, 1994.
[8363] 2477. Watanabe, A.; Takeda, K.; Ploplis, B.; Tachibana, M.: Epistatic relationship between Waardenburg syndrome genes MITF and PAX3. Nature Genet. 18: 283-286, 1998.
[8364] 2478. Yoshitake, H.; Rittling, S. R.; Denhardt, D. T.; Noda, M.: Osteopontin-deficient mice are resistant to ovariectomy-induced bone resorption. Proc. Nat. Acad. Sci. 96: 8156-8160, 1999.
[8365] 2479. St-Onge, L.; Sosa-Pineda, B.; Chowdhury, K.; Mansouri, A.; Gruss, P.: Pax6 is required for differentiation of glucagon-producing alpha-cells in mouse pancreas. Nature 387: 406-409, 1997.
[8366] 2480. Bongarzone, I.; Vigano, E.; Alberti, L.; Borrello, M. G.; Pasini, B.; Greco, A.; Mondellini, P.; Smith, D. P.; Ponder, B. A. J.; Romeo, G.; Pierotti, M. A.: Full activation of MEN2B mutant RET by an additional MEN2A mutation or by ligand GDNF stimulation. Oncogene 16: 2295-2301, 1998.
[8367] 2481. Carlson, K. M.; Bracamontes, J.; Jackson, C. E.; Clark, R.; Lacroix, A.; Wells, S. A., Jr.; Goodfellow, P. J.: Parent-of-origin effects in multiple endocrine neoplasia type 2B. Am. J. Hum. Genet. 55:1076-1082, 1994.
[8368] 2482. Carlson, K. M.; Dou, S.; Chi, D.; Scavarda, N.; Toshima, K.; Jackson, C. E.; Wells, S. A., Jr.; Goodfellow, P. J.; Donis-Keller, H.: Single missense mutation in the tyrosine kinase catalytic domain of the RET protooncogene is associated with multiple endocrine neoplasia type 2B. Proc. Nat. Acad. Sci. 91: 1579-1583, 1994.
[8369] 2483. Mulligan, L. M.; Eng, C.; Healey, C. S.; Clayton, D.; Kwok, J. B. J.; Gardner, E.; Ponder, M. A.; Frilling, A.; Jackson, C. E.; Lehnert, H.; Neumann, H. P. H.; Thibodeau, S. N.; Ponder, B. A. J.: Specific mutations of the RET protooncogene are related to disease phenotype in MEN 2A and FMTC. Nature Genet. 6: 70-74, 1994.
[8370] 2484. Disteche, C. M.; Brannan, C. I.; Larsen, A.; Adler, D. A.; Schorderet, D. F.; Gearing, D.; Copeland, N. G.; Jenkins, N. A.; Park, L. S.: The human pseudo autosomal GM-CSF receptor alpha subunit gene is autosomalin mouse. Nature Genet. 1: 333-336, 1992.
[8371] 2485. Fujii, J.; Zarain-Herzberg, A.; Willard, H. F.; Tada, M.; MacLennan, D. H.: Structure of the rabbit phospholamban gene, cloning of the human cDNA, and assignment of the gene to human chromosome 6. J. Biol. Chem. 266: 11669-11675, 1991.
[8372] 2486. McTiernan, C. F.; Frye, C. S.; Lemster, B. H.; Kinder, E. A.; Ogletree-Hughes, M. L.; Moravec, C. S.; Feldman, A. M.: The human phospholamban gene: structure and expression. J. Molec. Cell Cardiol. 31: 679-692, 1999.
[8373] 2487. Otsu, K.; Fujii, J.; Periasamy, M.; Difilippantonio, M.; Uppender, M.; Ward, D. C.; MacLennan, D. H.: Chromosome mapping of five human cardiac and skeletal muscle sarcoplasmic reticulum protein genes. Genomics 17:507-509, 1993.
[8374] 2488. Coleman, R. A.; Smith, W. L.; Narumiya, S.: Vil. International union of pharmacology classification of prostanoid receptors: properties, distribution, and structure of the receptors and their subtypes. Pharm. Rev. 46: 205-229, 1994.
[8375] 2489. Duncan, A. M. V.; Anderson, L. L.; Funk, C. D.; Abramovitz, M.; Adam, M.: Chromosomal localization of the human prostanoid receptor gene family. Genomics 25: 740-742, 1995.
[8376] 2490. Taketo, M.; Rochelle, J. M.; Sugimoto, Y.; Namba, T.; Honda, A.; Negishi, M.; Ichikawa, A.; Narumiya, S.; Seldin, M. F.: Mapping of the genes encoding mouse thromboxane A2 receptor and prostaglandin E receptor subtypes EP2 and EP3. Genomics 19: 585-588, 1994.
[8377] 2491. Shimomura, I.; Matsuda, M.; Hammer, R. E.; Bashmakov, Y.; Brown, M. S.; Goldstein, J. L.: Decreased IRS-2 and increased SREBP-1c lead to mixed insulin resistance and sensitivity in livers of lipodystrophic and ob/ob mice. Molec. Cell 6: 77-86, 2000.
[8378] 2492. Muyan, M.; Furuhashi, M.; Sugahara, T.; Boime, I.: The carboxy-terminal region of the beta-subunits of luteinizing hormone and chorionic gonadotropin differentially influence secretion and assembly of the heterodimers. Molec. Endocr. 10: 1678-1687, 1996.
[8379] 2493. Adam, M.; Boie, Y.; Rushmore, T. H.; Muller, G.; Bastien, L.; McKee, K. T.; Metters, K. M.; Abramovitz, M.: Cloning and expression of three isoforms of the human EP(3) prostanoid receptor. FEBS Lett. 338:170-174, 1994.
[8380] 2494. Kotani, M.; Tanaka, I.; Ogawa, Y.; Suganami, T.; Matsumoto, T.; Muro, S.; Yamamoto, Y.; Sugawara, A.; Yoshimasa, Y.; Sagawa, N.; Narumiya, S.; Nakao, K.: Multiple signal transduction pathways through two prostaglandin E receptor EP3 subtype isoforms expressed in human uterus. J. Clin. Endocr. Metab. 85: 4315-4322, 2000.
[8381] 2495. Kotani, M.; Tanaka, I.; Ogawa, Y.; Usui, T.; Mori, K.; Ichikawa, A.; Narumiya, S.; Yoshimi, T.; Nakao, K.: Molecular cloning and expression of multiple isoforms of human prostaglandin E receptor EP(3) subtype generated by alternative messenger RNA splicing: multiple second messenger systems and tissue-specific distributions. Molec. Pharm. 48: 869-879, 1995.
[8382] 2496. Kotani, M.; Tanaka, I.; Ogawa, Y.; Usui, T.; Tamura, N.; Mori, K.; Narumiya, S.; Yoshimi, T.; Nakao, K.: Structural organization of the human prostaglandin EP(3) receptor subtype gene (PTGER3). Genomics 40:425-434, 1997.
[8383] 2497. Schmid, A.; Thierauch, K.-H.; Schleuning, W.-D.; Dinter, H.: Splice variants of the human EP(3) receptor for prostaglandin E(2). Europ. J. Biochem. 228: 23-30, 1995.
[8384] 2498. Ushikubi, F.; Segi, E.; Sugimoto, Y.; Murata, T.; Matsuoka, T.; Kobayashi, T.; Hizaki, H.; Tuboi, K.; Katsuyama, M.; Ichikawa, A.; Tanaka, T.; Yoshida, N.; Narumiya, S.: Impaired febrile response in mice lacking the prostaglandin E receptor subtype EP(3). Nature 395:281-284, 1998.
[8385] 2499. Kaplan, R.; Morse, B.; Huebner, K.; Croce, C.; Howk, R.; Ravera, M.; Ricca, G.; Jaye, M.; Schlessinger, J.: Cloning of three human tyrosine phosphatases reveals a multigene family of receptor-linked protein-tyrosine-phosphatases expressed in brain. Proc. Nat. Acad. Sci. 87: 7000-7004, 1990.
[8386] 2500. Jirik, F. R.; Anderson, L. L.; Duncan, A. M. V.: The human protein-tyrosine phosphatase PTP-alpha/LRP gene (PTPA) is assigned to chromosome 20p13. Cytogenet. Cell Genet. 60: 117-118, 1992.
[8387] 2501. Jirik, F. R.; Janzen, N. M.; Melhado, I. G.; Harder, K. W.: Cloning and chromosomal assignment of a widely expressed human receptor-like protein-tyrosine phosphatase. FEBS Lett. 273: 239-242, 1990.
[8388] 2502. Matthews, R. J.; Cahir, E. D.; Thomas, M. L.: Identification of an additional member of the protein-tyrosine-phosphatase family: evidence for alternative splicing in the tyrosine phosphatase domain. Proc. Nat. Acad. Sci. 87: 4444-4448, 1990.
[8389] 2503. Rao, V. V. N. G.; Loffler, C.; Sap, J.; Schlessinger, J.; Hansmann, I.: The gene for receptor-linked protein-tyrosine-phosphatase (PTPA) is assigned to human chromosome 20p12-pter by in situ hybridization (ISH and FISH). Genomics 13: 906-907, 1992.
[8390] 2504. Schnittger, S.; Rao, V. V. N. G.; Deutsch, U.; Gruss, P.; Balling, R.; Hansmann, I.: PAX1, a member of the paired box-containing class of developmental control genes, is mapped to human chromosome 20p11.2 by in situ hybridization (ISH and FISH). Genomics 14: 740-744, 1992.
[8391] 2505. Ahmad, F.; Azevedo, J. L., Jr.; Cortright, R.; Dohm, G. L.; Goldstein, B. J.: Alternations in skeletal muscle protein-tyrosine phosphatase activity and expression in insulin-resistant human obesity and diabetes. J. Clin. Invest. 100: 449-458, 1997.
[8392] 2506. Brown-Shimer, S.; Johnson, K. A.; Lawrence, J. B.; Johnson, C.; Bruskin, A.; Green, N. R.; Hill, D. E.: Molecular cloning and chromosome mapping of the human gene encoding protein phosphotyrosyl phosphatase 1B. Proc. Nat. Acad. Sci. 87: 5148-5152, 1990.
[8393] 2507. Charbonneau, H.; Tonks, N. K.; Kumar, S.; Diltz, C. D.; Harrylock, M.; Cool, D. E.; Krebs, E. G.; Fischer, E. H.; Walsh, K. A.: Human placenta protein-tyrosine-phosphatase: amino acid sequence and relationship to a family of receptor-like proteins. Proc. Nat. Acad. Sci. 86:5252-5256, 1989.
[8394] 2508. Chernoff, J.; Schievella, A. R.; Jost, C. A.; Erikson, R. L.; Neel, B. G.: Cloning of a cDNA for a major human protein-tyrosine-phosphatase. Proc. Nat. Acad. Sci. 87: 2735-2739, 1990.
[8395] 2509. Mastick, C. C.; Brady, M. J.; Saltiel, A. R.: Insulin stimulates the tyrosine phosphorylation of caveolin. J. Cell Biol. 129: 1523-1531, 1995. Nager syndrome. Mammalian Genome 11:1000-1005, 2000.
[8396] 2521. Riazuddin, S.; Castelein, C. M.; Ahmed, Z. M.; Lalwani, A. K.; Mastroianni, M. A.; Naz, S.; Smith, T. N.; Liburd, N. A.; Friedman, T. B.; Griffith, A. J.; Riazuddin, S.; Wilcox, E. R.: Dominant modifier DFNM1 suppresses recessive deafness DFNB26. Nature Genet. 26: 431-434, 2000.
[8397] 2522. Coleman, M. P.; Ambrose, H. J.; Carrel, L.; Nemeth, A. H.; Willard, H. F.; Davies, K. E.: A novel gene, DXS8237E, lies within 20 kb upstream of UBEL in Xp11.23 and has a different X inactivation status. Genomics 31:135-138, 1996.
[8398] 2523. Inoue, A.; Takahashi, K. P.; Kimura, M.; Watanabe, T.; Morisawa, S.: Molecular cloning of a RNA binding protein, S1-1. Nucleic Acids Res. 24: 2990-2997, 1996.
[8399] 2524. Nagase, T.; Seki, N.; Tanaka, A.; Ishikawa, K.; Nomura, N.: Prediction of the coding sequences of unidentified human genes. IV. The coding sequences of 40 new genes (KIAA0121-KIAA0160) deduced by analysis of cDNA clones from human cell line KG-1. DNA Res. 2: 167-174, 1995.
[8400] 2525. Lin, C.-S.; Aebersold, R. H.; Leavitt, J.: Correction of the N-terminal sequences of the human plastin isoforms
[8401] 2510. Soubeyran, P.; Kowanetz, K.; Szymkiewicz, I.; Langdon, W. Y.; Dikic, I.: Cbl-CIN85-endophilin complex mediates ligand-induced down regulation of EGF receptors. Nature 416: 183-187, 2002.
[8402] 2511. Nakamura, M.; Nagano, T.; Chikama, T.; Nishida, T.: Role of the small GTP-binding protein Rho in epithelial cell migration in the rabbit cornea. Invest. Ophthal. Vis. Sci. 42: 941-947, 2001.
[8403] 2512. Rao, P. V.; Deng, P.-F.; Kumar, J.; Epstein, D. L.: Modulation of aqueous humor outflow facility by the Rho kinase-specific inhibitor Y-27632. Invest. Ophthal. Vis. Sci. 42: 1029-1037, 2001.
[8404] 2513. Gharib, B.; Fox, M. F.; Bartoli, C.; Giorgi, D.; Sansonetti, A.; Swallow, D. M.; Dagorn, J. C.; Berge-Lefranc, J. L.: Human regeneration protein/lithostathine genes map to chromosome 2p12. Ann. Hum. Genet. 57:9-16, 1993.
[8405] 2514. Miyashita, H.; Nakagawara, K.; Mori, M.; Narushima, Y.; Noguchi, N.; Moriizumi, S.; Takasawa, S.; Yonekura, H.; Takeuchi, T.; Okamoto, H.: Human REG family genes are tandemly ordered in a 95-kilobase region of chromosome 2p12. FEBS Lett. 377: 429-433, 1995.
[8406] 2515. Moriizumi, S.; Watanabe, T.; Unno, M.; Nakagawara, K.; Suzuki, Y.; Miyashita, H.; Yonekura, H.; Okamoto, H.: Isolation, structural determination and expression of a novel reg gene, human regl-beta. Biochim. Biophys. Acta 1217: 199-202, 1994.
[8407] 2516. Holmes, C.; Arranz, M. J.; Powell, J. F.; Collier, D. A.; Lovestone, S.: 5-HT-2A and 5-HT-2C receptor polymorphisms and psychopathologyin late onset Alzheimer's disease. Hum. Molec. Genet. 7: 1507-1509, 1998.
[8408] 2517. Grueneberg, D. A.; Natesan, S.; Alexandre, C.; Gilman, M. Z.: Human and Drosophila homeodomain proteins that enhance the DNA-binding activity of serum response factor. Science 257: 1089-1095, 1992.
[8409] 2518. Kern, M. J.; Argao, E. A.; Birkenmeier, E. H.; Rowe, L. B.; Potter, S. S.: Genomic organization and chromosome localization of the murine homeobox gene Pmx. Genomics 19: 334-340, 1994.
[8410] 2519. Nakamura, T.; Yamazaki, Y.; Hatano, Y.; Miura, I.: NUP98 is fused to PMX1 homeobox gene in human acute myelogenous leukemia with chromosome translocation t(1;11)(q23;p15). Blood 94: 741-747, 1999.
[8411] 2520. Norris, R. A.; Scott, K. K.; Moore, C. S.; Stetten, G.; Brown, C. R.; Jabs, E. W.; Wulfsberg, E. A.; Yu, J.; Kern, M. J.: Human PRRX1 and PRRX2 genes: cloning, expression, genomic localization, and exclusion as disease genes for by using anchored polymerase chain reaction: identification of a potential calcium-binding domain. Molec. Cell. Biol. 10: 1818-1821, 1990.
[8412] 2526. Lahn, B. T.; Page, D. C.: Functional coherence of the human Y chromosome. Science 278: 675-680, 1997.
[8413] 2527. Barletta, C.; Druck, T.; LaForgia, S.; Calabretta, B.; Drabkin, H.; Patterson, D.; Croce, C. M.; Huebner, K.: Chromosome locations of the MYB related genes, AMYB and BMYB. Cancer Res. 51: 3821-3824, 1991.
[8414] 2528. Nomura, N.; Takahashi, M.; Matsui, M.; Ishii, S.; Date, T.; Sasamoto, S.; Ishizaki, R.: Isolation of human cDNA clones of MYB-related genes, A-MYB and B-MYB. Nucleic Acids Res. 16: 11075-11089, 1988.
[8415] 2529. Takahashi, T.; Nakagoshi, H.; Sarai, A.; Nomura, N.; Yamamoto, T.; Ishii, S.: Human A-myb gene encodes a transcriptional activator containing the negative regulatory domains. FEBS Lett. 358: 89-96, 1995.
[8416] 2530. Ellis, N. A.: Ecce Ohno. Nature Genet. 10: 373-375, 1995.
[8417] 2531. Haldane, J. B. S.: Sex ratio and unisexual sterility in hybrid animals. J. Genet. 12: 101-109, 1922.
[8418] 2532. Milatovich, A.; Kitamura, T.; Miyajima, A.; Francke, U.: Gene for the alpha-subunit of the human interleukin-3 receptor (IL3RA) localized to the X-Y pseudo autosomal region. Am. J. Hum. Genet. 53:1146-1153, 1993.
[8419] 2533. Ohno, S.: Sex Chromosomes and Sex-linked Genes. Berlin and New York: Springer (pub.) 1967.
[8420] 2534. Palmer, S.; Perry, J.; Ashworth, A.: A contravention of Ohno's law in mice. Nature Genet. 10: 472-476, 1995.
[8421] 2535. Rugarli, E. I.; Adler, D. A.; Borsani, G.; Tsuchiya, K.; Franco, B.; Hauge, X.; Disteche, C.; Chapman, V.; Ballabio, A.: Different chromosomal localization of the Clcn4 gene in Mus spretus and C57BL/6j mice. Nature Genet. 10: 466-471, 1995.
[8422] 2536. Schnur, R. E.; Wick, P. A.: Intragenic TaqI restriction fragment length polymorphism (RFLP) in CLCN4, between the loci for X-linked ocular albinism (OA1) and microphthalmia with linear skin defects syndrome (MLS). Hum. Genet. 95: 594-595, 1995.
[8423] 2537. van Slegtenhorst, M. A.; Bassi, M. T.; Borsani, G.; Wapenaar, M. C.; Ferrero, G. B.; de Conciliis, L.; Rugarli, E. I.; Grillo, A.; Franco, B.; Zoghbi, H. Y.; Ballabio, A.: A gene from the Xp22.3 region shares homology with voltage-gated chloride channels. Hum. Molec. Genet. 3: 547-552, 1994.
[8424] 2538. Grandori, C.; Mac, J.; Siebelt, F.; Ayer, D. E.; Eisenman, R. N.: Myc-Max heterodimers activate a DEAD box gene and interact with multiple E box-related sites in vivo. EMBO J. 15: 4344-4357, 1996.
[8425] 2539. Prendergast, G. C.; Lawe, D.; Ziff, E. B.: Association of Myn, the murine homolog of Max, with c-Myc stimulates methylation-sensitive DNA binding and Ras cotransformation. Cell 65: 395-408, 1991.
[8426] 2540. Wagner, A. J.; Le Beau, M. M.; Diaz, M. O.; Hay, N.: Expression, regulation, and chromosomal localization of the Max gene. Proc. Nat. Acad. Sci. 89: 3111-3115, 1992.
[8427] 2541. Zervos, A. S.; Faccio, L.; Gatto, J. P.; Kyriakis, J. M.; Brent, R.: Mxi2, a mitogen-activated protein kinase that recognizes and phosphorylates Max protein. Proc. Nat. Acad. Sci. 92: 10531-10534, 1995.
[8428] 2542. Bonner, T. I.; Young, A. C.; de Miguel, C.; Detera-Wadleigh, S.; Modi, W. S.; O'Brien, S. J.: The chromosomal location of the two human tackykinin (sic) genes: human substance P and neurokinin K. (Abstract) Cytogenet. Cell Genet. 46: 584 only, 1987.
[8429] 2543. Cao, Y. Q.; Mantyh, P. W.; Carlson, E. J.; Gillespie, A.-M.; Epstein, C. J.; Basbaum, A. I.: Primary afferent tachykinins are required to experience moderate to intense pain. Nature 392: 390-393, 1998.
[8430] 2544. Krause, J. E.; Chirgwin, J. M.; Carter, M. S.; Xu, Z. S.; Hershey, A. D.: Three rat preprotachykinin mRNAs encode the neuropeptides substance P and neurokinin A. Proc. Nat. Acad. Sci. 84: 881-885, 1987.
[8431] 2545. Liu, H.; Cao, Y.; Basbaum, A. I.; Mazarati, A. M; Sankar, R.; Wasterlain, C. G.: Resistance to excitotoxin-induced seizures and neuronal death in mice lacking the preprotachykinin A gene. Proc. Nat. Acad. Sci. 96:12096-12101, 1999.
[8432] 2546. Troger, J.; Neyer, S.; Heufler, C.; Huemer, H.; Schmid, E.; Griesser, U.; Kralinger, M.; Kremser, B.; Baldissera, I.; Kieselbach, G.: Substance P and vasoactive intestinal polypeptide in the streptozotocin-induced diabetic rat retina. Invest. Ophthal. Vis. Sci. 42: 1045-1050, 2001.
[8433] 2547. Zimmer, A.; Zimmer, A. M.; Baffi, J.; Usdin, T.; Reynolds, K.; Konig, M.; Palkovits, M.; Mezey, E.: Hypoalgesia in mice with a targeted deletion of the tachykinin 1 gene. Proc. Nat. Acad. Sci. 95: 2630-2635, 1998.
[8434] 2548. Mattei, M.-G.; Riviere, M.; Krust, A.; Ingvarsson, S.; Vennstrom, B.; Islam, M. Q.; Levan, G.; Kautner, P.; Zelent, A.; Chambon, P.; Szpirer, J.; Szpirer, C.: Chromosomal assignment of retinoic acid receptor (RAR) genes in the human, mouse, and rat genomes. Genomics 10:1061-1069, 1991.
[8435] 2549. Abramson, D. H.; Ellsworth, R. M.; Zimmerman, L. E.: Monocular cancer in retinoblastoma survivors. Trans. Am. Acad. Ophthal. Otolaryng. 81:454-457, 1976.
[8436] 2550. Aherne, G. E. S.; Roberts, D. F.: Retinoblastoma—a clinical survey and its genetic implications. Clin. Genet. 8: 275-290, 1975.
[8437] 2551. Alonso, J.; Garcia-Miguel, P.; Abelairas, J.; Mendiola, M.; Sarret, E.; Vendrell, M. T.; Navajas, A.; Pestana, A.: Spectrum of germline RB1 gene mutations in Spanish retinoblastoma patients: phenotypic and molecular epidemiological implications. Hum. Mutat. 17: 412-422, 2001.
[8438] 2552. Amoaku, W. M. K.; Willshaw, H. E.; Parkes, S. E.; Shah, K. J.; Mann, J. R.: Trilateral retinoblastoma: a report of five patients. Cancer 78:858-863, 1996.
[8439] 2553. Bader, J. L.; Meadows, A. T.; Zimmerman, L. E.; Rorke, L. B.; Voute, P. A.; Champion, L. A. A.; Miller, R. W.: Bilateral retinoblastoma with ectopic intracranial retinoblastoma: trilateral retinoblastoma. Cancer Genet. Cytogenet. 5: 203-213, 1982.
[8440] 2554. Balaban-Malenbaum, G.; Gilbert, F.; Nichols, W. W.; Hill, R.; Shields, J.; Meadows, A. T.: A deleted chromosome no. 13 in human retinoblastoma cells: relevance to tumorigenesis. Cancer Genet. Cytogenet. 3: 243-250, 1981.
[8441] 2555. Bandara, L. R.; Adamczewski, J. P.; Hunt, T.; La Thangue, N. B.: Cyclin A and the retinoblastoma gene product complex with a common transcription factor. Nature 352: 249-251, 1991.
[8442] 2556. Benedict, W. F.; Murphree, A. L.; Banerjee, A.; Spina, C. A.; Sparkes, M. C.; Sparkes, R. S.: Patient with 13 chromosome deletion: evidence that the retinoblastoma gene is a recessive cancer gene. Science 219:973-975, 1983.
[8443] 2557. Benedict, W. F.; Xu, H.-J.; Hu, S.-X.; Takahashi, R.: Role of the retinoblastoma gene in the initiation and progression of human cancer. J. Clin. Invest. 85: 988-993, 1990.
[8444] 2558. Bia, B.; Cowell, J. K.: Independent constitutional germline mutations occurring in the RB1 gene in cousins with bilateral retinoblastoma. Oncogene 11:977-979, 1995.
[8445] 2559. Blanquet, V.; Turleau, C.; de Grouchy, J.; Creau-Goldberg, N.: Physical map around the retinoblastoma gene: possible genomic imprinting suggested by NruI digestion. Genomics 10: 350-355, 1991.
[8446] 2560. Blanquet, V.; Turleau, C.; Gross-Morand, M. S.; Senamaud-Beaufort, C.; Doz, F.; Besmond, C.: Spectrum of germline mutations in the RB1 gene: a study of 232 patients with hereditary and non hereditary retinoblastoma. Hum. Molec. Genet. 4: 383-388, 1995.
[8447] 2561. Nicklin, M. J. H.; Weith, A.; Duff, G. W.: A physical map of the region encompassing the human interleukin-1-alpha, interleukin-1-beta, and interleukin-1 receptor antagonist genes. Genomics 19: 382-384, 1994.
[8448] 2562. Ansano, M.; Toda, M.; Sakaguchi, N.; Sakaguchi, S.: Autoimmune disease as a consequence of developmental abnormality of a T cell subpopulation. J. Exp. Med. 184: 387-396, 1996.
[8449] 2563. Cosman, D.; Cerretti, D. P.; Larsen, A.; Park, L.; March, C.; Dower, S.; Gillis, S.; Urdal, D.: Cloning, sequence and expression of human interleukin-2 receptor. Nature 312: 768-771, 1984.
[8450] 2564. Ferrari, S.; Cannizzaro, L. A.; Battini, R.; Huebner, K.; Baserga, R.: The gene encoding human vimentin is located on the short arm of chromosome 10. Am. J. Hum. Genet. 41: 616-626, 1987.
[8451] 2565. Greene, W. C.; Leonard, W. J.; Depper, J. M.; Nelson, D. L.; Waldmann, T. A.: The human interleukin-2 receptor: normal and abnormal expression in T cells and in leukemias induced by the human T-lymphotropic retroviruses. Ann. Intern. Med. 105: 560-572, 1986.
[8452] 2566. Hatakeyama, M.; Minamoto, S.; Taniguchi, T.: Intracytoplasmic phosphorylation sites of Tac antigen (p55) are not essential for the conformation, function, and regulation of the human interleukin 2 receptor. Proc. Nat. Acad. Sci. 83: 9650-9654, 1986.
[8453] 2567. Hatakeyama, M.; Minamoto, S.; Uchiyama, T.; Hardy, R. R.; Yamada, G.; Taniguchi, T.: Reconstitution of functional receptor for human interleukin-2 in mouse cells. Nature 318: 467-470, 1985.
[8454] 2568. Ihle, J. N.; Kerr, I. M.: Jaks and Stats in signaling by the cytokine receptor superfamily. Trends Genet. 11: 69-74, 1995.
[8455] 2569. Ishida, N.; Kanamori, H.; Noma, T.; Nikaido, T.; Sabe, H.; Suzuki, N.; Shimizu, A.; Honjo, T.: Molecular cloning and structure of the human interleukin 2 receptor gene. Nucleic Acids Res. 13: 7579-7589, 1985.
[8456] 2570. Kondo, S.; Shimizu, A.; Maeda, M.; Tagaya, Y.; Yodoi, J.; Honjo, T.: Expression of functional human interleukin-2 receptor in mouse T cells by cDNA transfection. Nature 320: 75-77, 1986.
[8457] 2571. Leonard, W. J.; Depper, J. M.; Crabtree, G. R.; Rudikoff, S.; Pumphrey, J.; Robb, R. J.; Kronke, M.; Svetlik, P. B.; Peffer, N. J.; Waldmann, T. A.; Greene, W. C.: Molecular cloning and expression of cDNAs for the human interleukin-2 receptor. Nature 311: 626-631, 1984.
[8458] 2572. Chen, T.-R.; McMorris, F. A.; Creagan, R.; Ricciuti, F. C.; Tischfield, J.; Ruddle, F. H.: Assignment of the genes for malate oxidoreductase decarboxylating to chromosome 6 and peptidase B and lactate dehydrogenase B to chromosome 12 in man. Am. J. Hum. Genet. 25: 200-207, 1973.
[8459] 2573. Hamerton, J. L.; Mohandas, T.; McAlpine, P. J.; Douglas, G. R.: Localization of human gene loci using spontaneous chromosome rearrangements in human-Chinese hamster somatic cell hybrids. Am. J. Hum. Genet. 27:595-608, 1975.
[8460] 2574. Herbschleb-Voogt, E.; Meera Khan, P.: Defining the locus of origin of a genetically determined electrophoretic variant of a multilocus enzyme system; the Calcutta-1 of human LDH system is a B-locus variant. Hum. Genet. 57: 290-295, 1981.
[8461] 2575. Houki, N.; Matsushima, Y.; Kitamura, M.; Tukada, T.; Nishina, T.; Nakayama, T.: A case of deficiency of lactate dehydrogenase H-subunit. Jpn. J. Clin. Chem. 15: 85-90, 1986.
[8462] 2576. Kitamura, M.; Iijima, N.; Hashimoto, F.; Hiratsuka, A.: Hereditary deficiency of subunit H of lactate dehydrogenase. Clin. Chim. Acta 34:419-423, 1971.
[8463] 2577. Maekawa, M.; Sudo, K.; Kitajima, M.; Matsuura, Y.; Li, S. S.-L.; Kanno, T.: Analysis of a genetic mutation in an electrophoretic variant of the human lactate dehydrogenase-B(H) subunit. Hum. Genet. 91:423-426, 1993.
[8464] 2578. Maekawa, M.; Sudo, K.; Nagura, K.; Li, S. S.-L.; Kanno, T.: Population screening of lactate dehydrogenase deficiencies in Fukuoka Prefecture in Japan and molecular characterization of three independent mutations in the lactate dehydrogenase-B(H) gene. Hum. Genet. 93: 74-76, 1994.
[8465] 2579. Malpuech, G.; Kaplan, J. C.; Rethore, M. O.; Junien, C.; Geneix, A.: Une observation de deletion partielle du bras court du chromosome 12: localisation du gene de la lacticodes hydrogenase B. Lyon Med. 233:275-279, 1975.
[8466] 2580. Mayeda, K.; Weiss, L.; Lindahl, R.; Dully, M.: Localization of the human lactate dehydrogenase B gene on the short arm of chromosome 12. Am. J. Hum. Genet. 26: 59-64, 1974.
[8467] 2581. Miwa, S.; Nishima, T.; Kanehashi, Y.; Kitamura, M.; Hiratsuka, A.; Shizume, K.: Studies on erythrocyte metabolism in a case with hereditary deficiency of H-subunit of lactate dehydrogenase. Acta Haemat. Jpn. 34: 228-232, 1971.
[8468] 2582. Rasmussen, S. K.; Lautier, C.; Hansen, L.; Echwald, S. M.; Hansen, T.; Ekstrom, C. T.; Urhammer, S. A.; Borch-Johnsen, K.; Grigorescu, F.; Smith, R. J.; Pedersen, O.: Studies of the variability of the genes encoding the insulin-like growth factor I receptor and its ligand in relation to type 2 diabetes mellitus. J. Clin. Endocr. Metab. 85:1606-1610, 2000.
[8469] 2583. Leonard, W. J.; Depper, J. M.; Kanehisa, M.; Kronke, M.; Peffer, N. J.; Svetlik, P. B.; Sullivan, M.; Greene, W. C.: Structure of the human interleukin-2 receptor gene. Science 230: 633-639, 1985.
[8470] 2584. Leonard, W. J.; Depper, J. M.; Robb, R. J.; Waldmann, T. A.; Greene, W. C.: Characterization of the human receptor for T-cell growth factor. Proc. Nat. Acad. Sci. 80: 6957-6961, 1983.
[8471] 2585. Marx, J. L.: The interleukin-2 receptor gene is cloned. Science 226:1064-1065, 1985.
[8472] 2586. Nikaido, T.; Shimizu, A.; Ishida, N.; Sabe, H.; Teshigawara, K.; Maeda, M.; Uchiyama, T.; Yodoi, J.; Honjo, T.: Molecular cloning of a cDNA encoding human interleukin-2 receptor. Nature 311: 631-635, 1984.
[8473] 2587. Robb, R. J.; Rusk, C. M.; Neeper, M. P.: Structure-function relationships for the interleukin 2 receptor: location of ligand and antibody binding sites on the Tac receptor chain by mutational analysis. Proc. Nat. Acad. Sci. 85: 5654-5658, 1988.
[8474] 2588. Sharfe, N.; Dadi, H. K.; Shahar, M.; Roifman, C. M.: Human immune disorder arising from mutation of the alpha chain of the interleukin-2 receptor. Proc. Nat. Acad. Sci. 94: 3168-3171, 1997.
[8475] 2589. Shevach, E. M.: Certified professionals: CD4(+)CD25(+) suppressor T cells. J. Exp. Med. 193: F41-F45, 2001.
[8476] 2590. Tsudo, M.; Kozak, R. W.; Goldman, C. K.; Waldmann, T. A.: Demonstration of a non-Tac peptide that binds interleukin 2: a potential participant in a multichain interleukin 2 receptor complex. Proc. Nat. Acad. Sci. 83: 9694-9698, 1986.
[8477] 2591. Urdal, D. L.; March, C. J.; Gillis, S.; Larsen, A.; Dower, S. K.: Purification and chemical characterization of the receptor for interleukin 2 from activated human T lymphocytes and from a human T-cell lymphoma cell line. Proc. Nat. Acad. Sci. 81: 6481-6485, 1984.
[8478] 2592. Mohrenweiser, H. W.; Neel, J. V.: Frequency of thermostability variants: estimation of total ‘rare’ variant frequency in human populations. Proc. Nat. Acad. Sci. 78: 5729-5733, 1981.
[8479] 2593. Okumura, N.; Terasawa, F.; Ueno, I.; Oki, K.; Yamauchi, K.; Hidaka, H.; Tozuka, M.; Okura, M.; Katsuyama, T.: Genetic analyses in homozygous and heterozygous variants of lactate dehydrogenase-B (H) subunit: LD-B Matsumoto I and II (LD-B W323R). Clin. Chim. Acta 287: 163-171, 1999.
[8480] 2594. Rethore, M.-O.; Junien, C.; Malpuech, G.; Baccichetti, C.; Tenconi, R.; Kaplan, J. C.; de Romeuf, J.; Lejeune, J.: Localisation du genede la glyceraldehyde 3-phosphate dehydrogenase (G3PD) sur le segment distal du bras court du chromosome 12. Ann. Genet. 19: 140-142, 1976.
[8481] 2595. Rethore, M.-O.; Kaplan, J.-C.; Junien, C.; Cruveiller, J.; Dutrillaux, B.; Aurias, A.; Carpentier, S.; Lafourcade, J.; Lejeune, J.: Augmentationde l'activite de la LDH-B chez un garcon trisomique 12p par malsegregationd'une translocation maternelle t(12;14)(q12;p11). Ann. Genet. 18:81-87, 1975.
[8482] 2596. Sakai, I.; Sharief, F. S.; Pan, Y.-C. E.; Li, S. S.-L.: The cDNA and protein sequences of human lactate dehydrogenase B. Biochem. J. 248: 933-936, 1987.
[8483] 2597. Santachiara, A. S.; Nabholz, M.; Miggiano, V.; Darlington, A. J.; Bodmer, W. F.: Linkage between human lactate dehydrogenase Band peptidase B genes. Nature 227: 248-251, 1970.
[8484] 2598. Steinbach, P.; Rehder, H.: Tetrasomy for the short arm of chromosome 12 with accessory isochromosome (+i[12p]) and a marked LDH-B gene dosage effect. Clin. Genet. 32: 1-4, 1987.
[8485] 2599. Sudo, K.: Personal Communication. Komae City, Japan Jul. 12, 1993.
[8486] 2600. Sudo, K.; Maekawa, M.; Ikawa, S.; Machida, K.; Kitamura, M.; Li, S. S.-L.: A missense mutation found in human lactate dehydrogenase-B(H) variant gene. Biochem. Biophys. Res. Commun. 168: 672-676, 1990.
[8487] 2601. Sudo, K.; Maekawa, M.; Luedemann, M. M.; Deaven, L. L.; Li, S. S.-L.: Human lactate dehydrogenase-B processed pseudo gene: nucleotide sequence analysis and assignment to the X-chromosome. Biochem. Biophys. Res. Commun. 171: 67-74, 1990.
[8488] 2602. Sudo, K.; Maekawa, M.; Tomonaga, A.; Tsukada, T.; Nakayama, T.; Kitamura, M.; Li, S. S.-L.; Kanno, T.; Toriumi, J.: Molecular characterization of genetic mutations in human lactate dehydrogenase (LDH)B (H) variant. Hum. Genet. 89: 158-162, 1992.
[8489] 2603. Van Someren, H.; Meera Khan, P.; Westerveld, A.; Bootsma, D.: Human genetics—two new linkage groups carrying different loci for LDH and glutamic-pyruvic transaminase found. Nature 240: 221-222, 1972.
[8490] 2604. Weiss, L.; Mayeda, K.; Lindahl, R.; Dully, M.: Localization of human LDH-B gene of the short arm of chromosome 12. (Abstract) Am. J. Hum. Genet. 25: 85A only, 1973.
[8491] 2605. Rajagopalan, H.; Bardelli, A.; Lengauer, C.; Kinzler, K. W.; Vogelstein, B.; Velculescu, V. E.: RAF/RAS oncogenes and mismatch-repair status. (Letter) Nature 418: 934 only, 2002.
[8492] 2606. Zhong, S.; Delva, L.; Rachez, C.; Cenciarelli, C.; Gandini, D.; Zhang, H.; Kalantry, S.; Freedman, L. P.; Pandolfi, P. P.: A RA-dependent, tumour-growth suppressive transcription complex is the target of the PML-RAR-alpha and T18 oncoproteins. Nature Genet. 23: 287-295, 1999.
[8493] 2607. Fukuyama, R.; Ichijoh, Y.; Minoshima, S.; Kitamura, N.; Shimizu, N.: Assignment of hepatocyte growth factor (HGF) gene to chromosome 7q21.1. (Abstract) Cytogenet. Cell Genet. 58: 1921 only, 1991.
[8494] 2608. Fukuyama, R.; Ichijoh, Y.; Minoshima, S.; Kitamura, N.; Shimizu, N.: Regional localization of the hepatocyte growth factor (HGF) gene to human chromosome 7 band q21.1. Genomics 11: 410-415, 1991.
[8495] 2609. Gherardi, E.; Stoker, M.: Hepatocytes and scatter factor. Nature 346:228 only, 1990.
[8496] 2610. Gohda, E.; Tsubouchi, H.; Nakayama, H.; Hirono, S.; Sakiyama, O.; Takahashi, K.; Miyazaki, H.; Hashimoto, S.; Daikuhara, Y.: Purification and partial characterization of hepatocyte growth factor from plasma of a patient with fulminant hepatic failure. J. Clin. Invest. 81:414-419, 1988.
[8497] 2611. Kilby, M. D.; Afford, S.; Li, X. F.; Strain, A. J.; Ahmed, A.; Whittle, M. J.: Localisation of hepatocyte growth factor and its receptor (c-met) protein and mRNA in human term placenta. Growth Factors 13: 133-139, 1996.
[8498] 2612. Lai, L.; Goldschneider, I.: Cutting edge: identification of a hybrid cytokine consisting of IL-7 and the beta-chain of the hepatocyte growth factor/scatter factor. J. Immun. 167: 3550-3554, 2001.
[8499] 2613. Maina, F.; Casagranda, F.; Audero, E.; Simeone, A.; Comoglio, P. M.; Klein, R.; Ponzetto, C.: Uncoupling of Grb2 from the Met receptor in vivo reveals complex roles in muscle development. Cell 87: 531-542, 1996.
[8500] 2614. Miyazawa, K.; Tsubouchi, H.; Naka, D.; Takahashi, K.; Okigaki, M.; Arakaki, N.; Nakayama, H.; Hirono, S.; Sakiyama, O.; Takahashi, K.; Gohda, E.; Daikuhara, Y.; Kitamura, N.: Molecular cloning and sequence analysis of cDNA for human hepatocyte growth factor. Biochem. Biophys. Res. Commun. 163: 967-973, 1989.
[8501] 2615. Nakamura, T.; Nishizawa, T.; Hagiya, M.; Seki, T.; Shimonishi, M.; Sugimura, A.; Tashiro, K.; Shimizu, S.: Molecular cloning and expression of human hepatocyte growth factor. Nature 342: 440-443, 1989.
[8502] 2616. Noonan, F. P.; Recio, J. A.; Takayama, H.; Duray, P.; Anver, M. R.; Rush, W. L.; De Fabo, E. C.; Merlino, G.: Neonatal sunburn and melanoma in mice: severe sunburn in newborn, but not adult, mice is linked with melanoma in later life. Nature 413: 271-272, 2001.
[8503] 2617. Powell, E. M.; Mars, W. M.; Levitt, P.: Hepatocyte growth factor/scatter factor is a motogen for interneurons migrating from the ventral to dorsal telencephalon. Neuron 30: 79-89, 2001.
[8504] 2618. Rubin, J. S.; Chan, A. M.-L.; Bottaro, D. P.; Burgess, W. H.; Taylor, W. G.; Cech, A. C.; Hirschfield, D. W.; Wong, J.; Miki, T.; Finch, P. W.; Aaronson, S. A.: A broad-spectrum human lung fibroblast-derived mitogen is a variant of hepatocyte growth factor. Proc. Nat. Acad. Sci. 88: 415-419, 1991.
[8505] 2619. Saccone, S.; Narsimhan, R. P.; Gaudino, G.; Dalpra, L.; Comoglio, P. M.; Della Valle, G.: Regional mapping of the human hepatocyte growth factor (HGF)-scatter factor gene to chromosome 7q21.1. Genomics 13:912-914, 1992.
[8506] 2620. Schmidt, C.; Bladt, F.; Goedecke, S.; Brinkmann, V.; Zschiesche, W.; Sharpe, M.; Gherardi, E.; Birchmeier, C.: Scatter factor/hepatocyte growth factor is essential for liver development. Nature 373: 699-702, 1995.
[8507] 2621. Uehara, Y.; Minowa, O.; Mori, C.; Shiota, K.; Kuno, J.; Noda, T.; Kitamura, N.: Placental defect and embryonic lethality in mice lacking hepatocyte growth factor/scatter factor. Nature 373: 702-705, 1995.
[8508] 2622. Weidner, K. M.; Arakaki, N.; Hartmann, G.; Vandekerckhove, J.; Weingart, S.; Rieder, H.; Fonatsch, C.; Tsubouchi, H.; Hishida, T.; Daikuhara, Y.; Birchmeier, W.: Evidence for the identity of human scatter factor and human hepatocyte growth factor. Proc. Nat. Acad. Sci. 88: 7001-7005, 1991.
[8509] 2623. Zarnegar, R.; Petersen, B.; DeFrances, M. C.; Michalopoulos, G.: Localization of hepatocyte growth factor (HGF) gene on human chromosome 7. Genomics 12: 147-150, 1992.
[8510] 2624. Lafuse, W. P.; Zwilling, B. S.: Localization of the inhibin beta-B gene on mouse chromosome 1. Mammalian Genome 4: 399-400, 1993.
[8511] 2625. Salmenkivi, K.; Arola, J.; Voutilainen, R.; Ilvesmaki, V.; Haglund, C.; Kahri, A. I.; Heikkila, P.; Liu, J.: Inhibin/activin beta-B-subunit expression in pheochromocytomas favors benign diagnosis. J. Clin. Endocr. Metab. 86: 2231-2235, 2001.
[8512] 2626. Schrewe, H.; Gendron-Maguire, M.; Harbison, M. L.; Gridley, T.: Mice homozygous for a null mutation of activin beta B are viable and fertile. Mech. Dev. 47: 43-51, 1994.
[8513] 2627. Nicoll, J. A. R.; Mrak, R. E.; Graham, D. I.; Stewart, J.; Wilcock, G.; MacGowan, S.; Esiri, M. M.; Murray, L. S.; Dewar, D.; Love, S.; Moss, T.; Griffin, W. S. T.: Association of interleukin-1 gene polymorphisms with Alzheimer's disease. Ann. Neurol. 47: 365-368, 2000.
[8514] 2628. Rogers, J.: An IL-1-alpha susceptibility polymorphism in Alzheimer's disease: new fuel for the inflammation hypothesis. (Editorial) Neurology 55:464-465, 2000.
[8515] 2629. Sabatino, M.; Boyce, B.; Aufdemorte, T.; Bonewald, L.; Mundy, G. R.: Infusions of recombinant human interleukins 1 alpha and 1 beta cause hypercalcemia in normal mice. Proc. Nat. Acad. Sci. 85:5235-5239, 1988.
[8516] 2630. Silver, A. R. J.; Masson, W. K.; George, A. M.; Adam, J.; Cox, R.: The Il-1 alpha and beta genes are closely linked (less than 70 kb) on mouse chromosome 2. Somat. Cell Molec. Genet. 16: 549-556, 1990.
[8517] 2631. Tanaka, A. R.; Ikeda, Y.; Abe-Dohmae, S.; Arakawa, R.; Sadanami, K.; Kidera, A.; Nakagawa, S.; Nagase, T.; Aoki, R.; Kioka, N.; Amachi, T.; Yokoyama, S.; Ueda, K.: Human ABCA1 contains a large amino terminal extracellular domain homologous to an epitope of Sjogren's syndrome. Biochem. Biophys. Res. Commun. 283: 1019-1025, 2001.
[8518] 2632. Chesi, M.; Nardini, E.; Brents, L. A.; Schrock, E.; Ried, T.; Kuehl, W. M.; Bergsagel, P. L.: Frequent translocation t(4; 14)(p16.3;q32.3) in multiple myeloma is associated with increased expression and activating mutations of fibroblast growth factor receptor 3. Nature Genet. 16:260-264, 1997.
[8519] 2633. Baroni, M. G.; Oelbaum, R. S.; Pozzilli, P.; Stocks, J.; Li, S.-R.; Fiore, V.; Galton, D. J.: Polymorphisms at the GLUT1 (HepG2) and GLUT4 (muscle/adipocyte) glucose transporter genes and non-insulin-dependent diabetes mellitus (NIDDM). Hum. Genet. 88: 557-561, 1992.
[8520] 2634. Kelley, M. J.; Pech, M.; Seuanez, H. N.; Rubin, J. S.; O'Brien, S. J.; Aaronson, S. A.: Emergence of the keratinocyte growth factor multigene family during the great ape radiation. Proc. Nat. Acad. Sci. 89: 9287-9291, 1992.
[8521] 2635. Mattei, M.-G.; deLapeyriere, O.; Bresnick, J.; Dickson, C.; Birnbaum, D.; Mason, I.: Mouse Fgf7 (fibroblast growth factor 7) and Fgf8 (fibroblast growth factor 8) genes map to chromosomes 2 and 19 respectively. Mammalian Genome 6: 196-197, 1995.
[8522] 2636. Rubin, J. S.; Osada, H.; Finch, P. W.; Taylor, W. G.; Rudikoff, S.; Aaronson, S. A.: Purification and characterization of a newly identified growth factor specific for epithelial cells. Proc. Nat. Acad. Sci. 86: 802-806, 1989.
[8523] 2637. Werner, S.; Smola, H.; Liao, X.; Longaker, M. T.; Krieg, T.; Hofschneider, P. H.; Williams, L. T.: The function of KGF in morphogenesis of epithelium and reepithelialization of wounds. Science 266: 819-822, 1994.
[8524] 2638. Zimonjic, D. B.; Kelley, M. J.; Rubin, J. S.; Aaronson, S. A.; Popescu, N. C.: Fluorescence in situ hybridization analysis of keratinocyte growth factor gene amplification and dispersion in evolution of great apes and humans. Proc. Nat. Acad. Sci. 94: 11461-11465, 1997.
[8525] 2639. Nagase, T.; Seki, N.; Ishikawa, K.; Tanaka, A.; Nomura, N.: Prediction of the coding sequences of unidentified human genes. V. The coding sequences of 40 new genes (KIAA0161-KIAA0200) deduced by analysis of cDNA clones from human cell line KG-1. DNA Res. 3: 17-24, 1996.
[8526] 2640. Bassi, M. T.; Ramesar, R. S.; Caciotti, B.; Winship, I. M.; DeGrandi, A.; Riboni, M.; Townes, P. L.; Beighton, P.; Ballabio, A.; Borsani, G.: X-linked late-onset sensorineural deafness caused by a deletion involving OA1 and a novel gene containing WD-40 repeats. Am. J. Hum. Genet. 64: 1604-1616, 1999.
[8527] 2641. Converse, P. J.: Personal Communication. Baltimore, Md. Aug. 24, 2001.
[8528] 2642. Disteche, C. M.; Dinulos, M. B.; Bassi, M. T.; Elliott, R. W.; Rugarli, E. I.: Mapping of the murine Tbll gene reveals a new rearrangement between mouse and human X chromosomes. Mammalian Genome 9: 1062-1064, 1998.
[8529] 2643. Dong, X.; Tsuda, L.; Zavitz, K. H.; Lin, M.; Li, S.; Carthew, R. W.; Zipursky, S. L.: ebi regulates epidermal growth factor receptor signaling pathways in Drosophila. Genes Dev. 13: 954-965, 1999.
[8530] 2644. Matsuzawa, S.; Reed, J. C.: Siah-1, SIP, and Ebi collaborate in a novel pathway for beta-catenin degradation linked to p53 responses. Molec. Cell 7: 915-926, 2001.
[8531] 2645. Zhang, J.; Kalkum, M.; Chait, B. T.; Roeder, R. G.: The N-CoR-HDAC3 nuclear receptor corepressor complex inhibits the JNK pathway through the integral subunit GPS2. Molec. Cell 9: 611-623, 2002.
[8532] 2646. Farndon, J. R.; Leight, G. S.; Dilley, W. G.; Baylin, S. B.; Smallridge, R. C.; Harrison, T. S.; Wells, S. A., Jr.: Familial medullary thyroid carcinoma without associated endocrinopathies: a distinct clinical entity. Brit. J. Surg. 73: 278-281, 1986.
[8533] 2647. Ellis, S. A.; Palmer, M. S.; McMichael, A. J.: Human trophoblast and the choriocarcinoma cell line BeWo express a truncated HLA class I molecule. J. Immun. 144: 731-735, 1990.
[8534] 2648. Geraghty, D. E.; Koller, B. H.; Orr, H. T.: A human major histocompatibility complex class I gene that encodes a protein with a shortened cytoplasmic segment. Proc. Nat. Acad. Sci. 84: 9145-9149, 1987.
[8535] 2649. Geraghty, D. E.; Pei, J.; Lipsky, B.; Hansen, J. A.; Taillon-Miller, P.; Bronson, S. K.; Chaplin, D. D.: Cloning and physical mapping of the HLA class I region spanning the HLA-E-to-HLA-F interval by using yeast artificial chromosomes. Proc. Nat. Acad. Sci. 89: 2669-2673, 1992.
[8536] 2650. Hurks, H. M. H.; Valter, M. M.; Wilson, L.; Hilgert, I.; van denElsen, P. J.; Jager, M. J.: Uveal melanoma: no expression of HLA-G. Invest. Ophthal. Vis. Sci. 42: 3081-3084, 2001.
[8537] 2651. Kirszenbaum, M.; Moreau, P.; Gluckman, E.; Dausset, J.; Carosella, E.: An alternatively spliced form of HLA-G mRNA in human trophoblasts and evidence for the presence of HLA-G transcript in adult lymphocytes. Proc. Nat. Acad. Sci. 91: 4209-4213, 1994.
[8538] 2652. Lila, N.; Carpentier, A.; Amrein, C.; Khalil-Daher, I.; Dausset, J.; Carosella, E. D.: Implication of HLA-G molecule in heart-graft acceptance. Lancet 355: 2138 only, 2000.
[8539] 2653. McAlpine, P. J.: Personal Communication. Winnipeg, Manitoba, Canada Jun. 22, 1988.
[8540] 2654. Morales, P.; Corell, A.; Martinez-Laso, J.; Martin-Villa, J. M.; Varela, P.; Paz-Artal, E.; Allende, L.-M.; Arnaiz-Villena, A.: Three new HLA-G alleles and their linkage disequilibria with HLA-A. Immunogenetics 38:323-331, 1993.
[8541] 2655. Onno, M.; Guillaudeux, T.; Amiot, L.; Renard, I.; Drenou, B.; Hirel, B.; Girr, M.; Semana, G.; Le Bouteiller, P.; Fauchet, R.: The HLA-G gene is expressed at a low mRNA level in different human cells and tissues. Human Immun. 41: 79-86, 1994.
[8542] 2656. Paul, P.; Rouas-Freiss, N.; Khalil-Daher, I.; Moreau, P.; Riteau, B.; Le Gal, F. A.; Avril, M. F.; Dausset, J.; Guillet, J. G.; Carosella, E. D.: HLA-G expression in melanoma: a way for tumor cells to escape from immunosurveillance. Proc. Nat. Acad. Sci. 95: 4510-4515, 1998.
[8543] 2657. Rouas-Freiss, N.; Marchal, R. E.; Kirszenbaum, M.; Dausset, J.; Carosella, E. D.: The alphal domain of HLA-G1 and HLA-G2 inhibits cytotoxicity induced by natural killer cells: is HLA-G the public ligand for natural killer cell inhibitory receptors? Proc. Nat. Acad. Sci. 94: 5249-5254, 1997.
[8544] 2658. Schmidt, C. M.; Orr, H. T.: A physical linkage map of HLA-A,-G, -7.5p, and -F. Hum. Immun. 31: 180-185, 1991.
[8545] 2659. Heisler, L. K.; Cowley, M. A.; Tecott, L. H.; Fan, W.; Low, M. J.; Smart, J. L.; Rubinstein, M.; Tatro, J. B.; Marcus, J. N.; Holstege, H.; Lee, C. E.; Cone, R. D.; Elmquist, J. K.: Activation of central melanocortin pathways by fenfluramine. Science 297: 609-611, 2002.
[8546] 2660. Swan, D. C.; McBride, O. W.; Robbins, K. C.; Keithley, D. A.; Reddy, E. P.; Aaronson, S. A.: Chromosomal mapping of the simian sarcoma virus onc gene analogue in human cells. Proc. Nat. Acad. Sci. 79: 4691-4695, 1982.
[8547] 2661. Guru, S. C.; Agarwal, S. K.; Manickam, P.; Olufemi, S.-E.; Crabtree, J. S.; Weisemann, J. M.; Kester, M. B.; Kim, Y. S.; Wang, Y.; Emmert-Buck, M. R.; Liotta, L. A.; Spiegel, A. M.; Boguski, M. S.; Roe, B. A.; Collins, F. S.; Marx, S. J.; Burns, L.; Chandrasekharappa, S. C.: A transcript map for the 2.8-Mb region containing the multiple endocrineneoplasia type 1 locus. Genome Res. 7: 725-735, 1997.
[8548] 2662. Van Leeuwen, A.: Di-allelic allo-antigenic systems on human T-lymphocyte subsets. Thesis: London Hospital Medical College (pub.) 1982.
[8549] 2663. Walker, I. D.; Sandrin, M. S.; Hogarth, P. M.; Sutton, V. R.; McKenzie, I. F. C.: Expression of Qa alloantigens on peripheral T cells: the relationship of the Qa-m2, 7, 8, 9 specificities. Immunogenetics 24:90-94, 1986.
[8550] 2664. Yokoyama, W. M.: The mother-child union: the case of missing-self and protection of the fetus. Proc. Nat. Acad. Sci. 94: 5998-6000, 1997.
[8551] 2665. Aizawa, S.; Nakano, H.; Ishida, T.; Horie, R.; Nagai, M.; Ito, K.; Yagita, H.; Okumura, K.; Inoue, J.; Watanabe, T.: Tumor necrosis factor receptor-associated factor (TRAF) 5 and TRAF2 are involved in CD30-mediated NF-kappa-B activation. J. Biol. Chem. 272: 2042-2045, 1997.
[8552] 2666. Gregor, P.; Reeves, R. H.; Jabs, E. W.; Yang, X.; Dackowski, W.; Rochelle, J. M.; Brown, R. H., Jr.; Haines, J. L.; O'Hara, B. F.; Uhl, G. R.; Seldin, M. F.: Chromosomal localization of glutamate receptor genes: relationship to familial amyotrophic lateral sclerosis and other neurological disorders of mice and humans. Proc. Nat. Acad. Sci. 90: 3053-3057, 1993.
[8553] 2667. Sun, W.; Ferrer-Montiel, A. V.; Schinder, A. F.; McPherson, J. P.; Evans, G. A.; Montal, M.: Molecular cloning, chromosomal mapping, and functional expression of human brain glutamate receptors. Proc. Nat. Acad. Sci. 89: 1443-1447, 1992.
[8554] 2668. Anderson, L. A.; Friedman, L.; Osborne-Lawrence, S.; Lynch, E.; Weissenbach, J.; Bowcock, A.; King, M.-C.: High-density genetic map of the BRCA1 region of chromosome 17q12-q21. Genomics 17: 618-623, 1993.
[8555] 2669. Zurawski, S. M.; Vega, F., Jr.; Huyghe, B.; Zurawski, G.: Receptors for interleukin-13 and interleukin-4 are complex and share a novel component that functions in signal transduction. EMBO J. 12: 2663-2670, 1993.
[8556] 2670. Aleman, A.; Verhaar, H. J. J.; De Haan, E. H. F.; De Vries, W. R.; Samson, M. M.; Drent, M. L.; Van Der Veen, E. A.; Koppeschaar, H. P. F.: Insulin-like growth factor-I and cognitive function in healthy older men. J. Clin. Endocr. Metab. 84: 471-475, 1999.
[8557] 2671. Baker, J.; Liu, J.-P.; Robertson, E. J.; Efstratiadis, A.: Role of insulin-like growth factors in embryonic and postnatal growth. Cell 75:73-82, 1993.
[8558] 2672. Bowcock, A.; Sartorelli, V.: Polymorphism and mapping of the IGF1 gene, and absence of association with stature among African Pygmies. Hum. Genet. 85: 349-354, 1990.
[8559] 2673. Camacho-Hubner, C.; Woods, K. A.; Miraki-Moud, F.; Hindmarsh, P. C.; Clark, A. J.; Hansson, Y.; Johnston, A.; Baxter, R. C.; Savage, M. O.: Effects of recombinant human insulin-like growth factor I(IGF-I) therapy on the growth hormone-IGF system of a patient with a partial IGF-I gene deletion. J. Clin. Endocr. Metab. 84: 1611-1616, 1999.
[8560] 2674. Goddard, A. D.; Covello, R.; Luoh, S.-M.; Clackson, T.; Attie, K. M.; Gesundheit, N.; Rundle, A. C.; Wells, J. A.; Carlsson, L. M. S.: Mutations of the growth hormone receptor in children with idiopathic short stature. New Eng. J. Med. 333: 1093-1098, 1995.
[8561] 2675. Guler, H.-P.; Binz, K.; Eigenmann, E.; Jaggi, S.; Zimmermann, D.; Zapf, J.; Froesch, E. R.: Small stature and insulin-like growth factors: prolonged treatment of minipoodles with recombinant human insulin-like growth factor 1. Acta Endocr. 121: 456-464, 1989.
[8562] 2676. Garland, D.; Rao, P. V.; Del Corso, A.; Mura, U.; Zigler, J. S. Jr.: Zeta-crystallin is a major protein in the lens of Camelus dromedarius. Arch. Biochem. Biophys. 285: 134-136, 1991.
[8563] 2677. Gonzalez, P.; Rao, P. V.; Zigler, J. S., Jr.: Organization of the human zeta-crystallin/quinone reductase gene (CRYZ). Genomics 21:317-324, 1994.
[8564] 2678. Heinzmann, C.; Kojis, T. L.; Gonzalez, P.; Rao, P. V.; Zigler, J. S., Jr.; Polymeropoulos, M. H.; Klisak, I.; Sparkes, R. S.; Mohandas, T.; Bateman, J. B.: Assignment of the zeta-crystallin gene (CRYZ) to human chromosome 1p22-p31 and identification of restriction fragment length polymorphisms. Genomics 23: 403-407, 1994.
[8565] 2679. Huang, Q.-L.; Russell, P.; Stone, S. H.; Zigler, J. S., Jr.: Zeta-crystallin, a novel lens protein from the guinea pig. Curr. Eye Res. 6: 725-732, 1987.
[8566] 2680. Rodriguez, I. R.; Gonzalez, P.; Zigler, J. S., Jr.; Borras, T.: A guinea-pig hereditary cataract contains a splice site deletionin a crystallin gene. Biochim. Biophys. Acta 1180: 44-52, 1992.
[8567] 2681. Kremmidiotis, G.; Baker, E.; Crawford, J.; Eyre, H. J.; Nahmias, J.; Callen, D. F.: Localization of human cadherin genes to chromosome regions exhibiting cancer-related loss of heterozygosity. Genomics 49:467-471, 1998.
[8568] 2682. Clayerie, J.-M.; Hardelin, J.-P.; Legouis, R.; Levilliers, J.; Bougueleret, L.; Mattei, M.-G.; Petit, C.: Characterization and chromosomal assignment of a human cDNA encoding a protein related to the murine 102-kDa cadherin-associated protein (alpha-catenin). Genomics 15:13-20, 1993.
[8569] 2683. Cook, S. A.; Bronson, R. T.; Donahue, L. R.; Ben-Arie, N.; Davisson, M. T.: Cerebellar deficient folia (cdf): a new mutation on mouse chromosome 6. Mammalian Genome 8: 108-112, 1997.
[8570] 2684. Herrenknecht, K.; Ozawa, M.; Eckerskorn, C.; Lottspeich, F.; Lenter, M.; Kemler, R.: The uvomorulin-anchorage protein alpha-catenin is a vinculin homologue. Proc. Nat. Acad. Sci. 88: 9156-9160, 1991.
[8571] 2685. Park, C.; Falls, W.; Finger, J. H.; Longo-Guess, C. M.; Ackerman, S. L.: Deletion in Catna2, encoding alphaN-catenin, causes cerebellar and hippocampal lamination defects and impaired startle modulation. Nature Genet. 31: 279-284, 2002.
[8572] 2686. Hanson, I.; Churchill, A.; Love, J.; Axton, R.; Moore, T.; Clarke, M.; Meire, F.; van Heyningen, V.: Missense mutations in the mostancient residues of the PAX6 paired domain underlie a spectrum of human congenital eye malformations. Hum. Molec. Genet. 8: 165-172, 1999.
[8573] 2687. Martin-Subero, J. I.; Gesk, S.; Harder, L.; Sonoki, T.; Tucker, P. W.; Schlegelberger, B.; Grote, W.; Novo, F. J.; Calasanz, M. J.; Hansmann, M. L.; Dyer, M. J. S.; Siebert, R.: Recurrent involvement of the REL and BCL11A loci in classical Hodgkin lymphoma. Blood 99:1474-1477, 2002.
[8574] 2688. Hankinson, S. E.; Willett, W. C.; Colditz, G. A.; Hunter, D. J.; Michaud, D. S.; Deroo, B.; Rosner, B.; Speizer, F. E.; Pollak, M.: Circulating concentrations of insulin-like growth factor-I and risk of breast cancer. Lancet 351: 1393-1396, 1998.
[8575] 2689. Emi, M.; Asaoka, H.; Matsumoto, A.; Itakura, H.; Kurihara, Y.; Wada, Y.; Kanamori, H.; Yazaki, Y.; Takahashi, E.; Lepert, M.; Lalouel, J.-M.; Kodama, T.; Mukai, T.: Structure, organization, and chromosomal mapping of the human macrophage scavenger receptor gene. J. Biol. Chem. 268: 2120-2125, 1993.
[8576] 2690. Latil, A.; Lidereau, R.: Genetic aspects of prostate cancer. Virchows Arch. 432: 389-406, 1998.
[8577] 2691. Matsumoto, A.; Naito, M.; Itakura, H.; Ikemoto, S.; Asaoka, H.; Hayakawa, I.; Kanamori, H.; Aburatani, H.; Takaku, F.; Suzuki, H.; Kobari, Y.; Miyai, T.; Takahashi, K.; Cohen, E. H.; Wydro, R.; Housman, D. E.; Kodama, T.: Human macrophage scavenger receptors: primary structure, expression, and localization in atherosclerotic lesions. Proc. Nat. Acad. Sci. 87: 9133-9137, 1990.
[8578] 2692. Xu, J.; Zheng, S. L.; Hawkins, G. A.; Faith, D. A.; Kelly, B.; Isaacs, S. D.; Wiley, K. E.; Chang, B.; Ewing, C. M.; Bujnovszky, P.; Carpten, J. D.; Bleecker, E. R.; Walsh, P. C.; Trent, J. M.; Meyers, D. A.; Isaacs, W. B.: Linkage and association studies of prostate cancer susceptibility: evidence for linkage at 8p22-23. Am. J. Hum. Genet. 69: 341-350, 2001.
[8579] 2693. Xu, J.; Zheng, S. L.; Komiya, A.; Mychaleckyj, J. C.; Isaacs, S. D.; Hu, J. J.; Sterling, D.; Lange, E. M.; Hawkins, G. A.; Turner, A.; Ewing, C. M.; Faith, D. A.; and 19 others: Germline mutations and sequence variants of the macrophage scavenger receptor 1 gene are associated with prostate cancer risk. Nature Genet. 32: 321-325, 2002.
[8580] 2694. Harman, S. M.; Metter, E. J.; Blackman, M. R.; Landis, P. K.; Carter, H. B.: Serum levels of insulin-like growth factor I (IGF-I), IGF-II, IGF-binding protein-3, and prostate-specific antigen as predictors of clinical prostate cancer. J. Clin. Endocr. Metab. 85: 4258-4265, 2000.
[8581] 2695. Holly, J.: Insulin-like growth factor-I and new opportunities for cancer prevention. Lancet 351: 1373-1375, 1998.
[8582] 2696. Hoppener, J. W. M.; de Pagter-Holthuizen, P.; Geurts van Kessel, A. H. M.; Jansen, M.; Kittur, S. D.; Antonarakis, S. E.; Lips, C. J. M.; Sussenbach, J. S.: The human gene encoding insulin-like growth factor I is located on chromosome 12. Hum. Genet. 69: 157-160, 1985.
[8583] 2697. Le Bouc, Y.; Dreyer, D.; Jaeger, F.; Binoux, M.; Sondermeyer, P.: Complete characterization of the human IGFI nucleotide sequence isolated from a newly constructed adult liver cDNA library. FEBS Lett. 196: 108-112, 1986.
[8584] 2698. Hellstrom, A.; Perruzzi, C.; Ju, M.; Engstrom, E.; Hard, A.-L.; Liu, J.-L.; Albertsson-Wikland, K.; Carlsson, B.; Niklasson, A.; Sjodell, L.; LeRoith, D.; Senger, D. R.; Smith, L. E. H.: Low IGF-I suppresses VEGF-survival signaling in retinal endothelial cells: direct correlation with clinical retinopathy of prematurity. Proc. Nat. Acad. Sci. 98:5804-5808, 2001.
[8585] 2699. Lembo, G.; Rockman, H. A.; Hunter, J. J.; Steinmetz, H.; Koch, W. J.; Ma, L.; Printz, M. P.; Ross, J., Jr.; Chien, K. R.; Powell-Braxton, L.: Elevated blood pressure and enhanced myocardial contractilityin mice with severe IGF-1 deficiency. J. Clin. Invest. 98: 2648-2655, 1996.
[8586] 2700. Li, C. H.; Yamashiro, D.; Gospodarowicz, D.; Kaplan, S. L.; Van Vliet, G.: Total synthesis of insulin-like growth factor I (somatomedin C). Proc. Nat. Acad. Sci. 80: 2216-2220, 1983.
[8587] 2701. Liu, J.-P.; Baker, J.; Perkins, A. S.; Robertson, E. J.; Efstratiadis, A.: Mice carrying null mutations of the genes encoding insulin-like growth factor I (Igf-1) and type 1 IGF receptor (Igf1r). Cell 75:59-72, 1993.
[8588] 2702. Mathews, L. S.; Norstedt, G.; Palmiter, R. D.: Regulation of insulin-like growth factor I gene expression by growth hormone. Proc. Nat. Acad. Sci. 83: 9343-9347, 1986.
[8589] 2703. Morton, C.; Rall, L.; Bell, G.; Shows, T.: Human insulin-like growth factor-1 (IGF1) is encoded at 12q22-q24.1, and insulin-like growth factor-2 (IGF2) is at 11p15. (Abstract) Cytogenet. Cell Genet. 40:703 only, 1985.
[8590] 2704. Musaro, A.; McCullagh, K.; Paul, A.; Houghton, L.; Dobrowolny, G.; Molinaro, M.; Barton, E. R.; Sweeney, H. L.; Rosenthal, N.: Localized Igf-1 transgene expression sustains hypertrophy and regeneration insenescent skeletal muscle. Nature Genet. 27: 195-200, 2001.
[8591] 2705. Musaro, A.; McCullagh, K. J. A.; Naya, F. J.; Olson, E. N.; Rosenthal, N.: IGF-1 induces skeletal myocyte hypertrophy through calcineurin in association with GATA-2 and NF-ATc1. Nature 400: 581-585, 1999.
[8592] 2706. Playford, M. P.; Bicknell, D.; Bodmer, W. F.; Macaulay, V. M.: Insulin-like growth factor 1 regulates the location, stability, and transcriptional activity of betacatenin. Proc. Nat. Acad. Sci. 97:12103-12108, 2000.
[8593] 2707. Powell-Braxton, L.; Hollingshead, P.; Warburton, C.; Dowd, M.; Pitts-Meek, S.; Dalton, D.; Gillett, N.; Stewart, T. A.: IGF-I is required for normal embryonic growth in mice. Genes Dev. 7: 2609-2617, 1993.
[8594] 2708. Rapp, R.; Deger, A.; Blum, W.; Koch, R.; Weber, U.: Characterization of the protein which binds insulin-like growth factor in human serum. Europ. J. Biochem. 172: 421-425, 1988.
[8595] 2709. Rotwein, P.: Two insulin-like growth factor I messenger RNAs are expressed in human liver. Proc. Nat. Acad. Sci. 83: 77-81, 1986.
[8596] 2710. Schoenle, E. J.; Zenobi, P. D.; Torresani, T.; Werder, E. A.; Zachmann, M.; Froesch, E. R.: Recombinant human insulin-like growth factor I (rhIGF I) reduces hyperglycaemia in patients with extreme insulin resistance. Diabetologia 34: 675-679, 1991.
[8597] 2711. Semsarian, C.; Wu, M.-J.; Ju, Y.-K.; Marciniec, T.; Yeoh, T.; Allen, D. G.; Harvey, R. P.; Graham, R. M.: Skeletal muscle hypertrophy is mediated by a Ca(2+)-dependent calcineurin signalling pathway. Nature 400:576-581, 1999.
[8598] 2712. Svoboda, M. E.; Van Wyk, J. J.; Klapper, D. G.; Fellows, R. E.; Grissom, F. E.; Schleuter, R. J.: Purification of somatomedin-C from human plasma: chemical and biological properties, partial sequence analysis, and relationship to other somatomedins. Biochemistry 19:790-797, 1980.
[8599] 2713. Taylor, B. A.; Grieco, D.: Localization of the gene encoding insulin-like growth factor I on mouse chromosome 10. Cytogenet. Cell Genet. 56: 57-58, 1991.
[8600] 2714. Tricoli, J. V.; Rall, L. B.; Scott, J.; Bell, G. I.; Shows, T. B.: Insulin-like growth factor genes: chromosome organization and association with disease. (Abstract) Am. J. Hum. Genet. 36: 121Sonly, 1984.
[8601] 2715. Tricoli, J. V.; Rall, L. B.; Scott, J.; Bell, G. I.; Shows, T. B.: Localization of insulin-like growth factor genes to human chromosomes 11 and 12. Nature 310: 784-786, 1984.
[8602] 2716. Ullrich, A.; Berman, C. H.; Dull, T. J.; Gray, A.; Lee, J. M.: Isolation of the human insulin-like growth factor I gene using a single synthetic DNA probe. EMBO J. 3: 361-364, 1984.
[8603] 2717. Thomas, J. T.; Kilpatrick, M. W.; Lin, K.; Erlacher, L.; Lembessis, P.; Costa, T.; Tsipouras, P.; Luyten, F. P.: Disruption of human limb morphogenesis by a dominant negative mutation in CDMP1. Nature Genet. 58-64, 1997.
[8604] 2718. Fryns, J. P.; van den Berghe, K.; van Assche, A.; van den Berghe, H.: Prenatal diagnosis of campomelic dwarfism. Clin. Genet. 19:199-201, 1981.
[8605] 2719. Mellows, H. J.; Pryse-Davies, J.; Bennett, M. J.; Carter, C. O.: The camptomelic syndrome in two female siblings. Clin. Genet. 18:137-141, 1980.
[8606] 2720. Xu, L.; Xia, J.; Jiang, H.; Zhou, J.; Li, H.; Wang, D.; Pan, Q.; Long, Z.; Fan, C.; Deng, H.-X.: Mutation analysis of hereditary multiple exostoses in the Chinese. Hum. Genet. 105: 45-50, 1999.
[8607] 2721. Simmons, A. D.; Musy, M. M.; Lopes, C. S.; Hwang, L.-Y.; Yang, Y.-P.; Lovett, M.: A direct interaction between EXT proteins and glycosyltransferases is defective in hereditary multiple exostoses. Hum. Molec. Genet. 8: 2155-2164, 1999.
[8608] 2722. Bevilacqua, M.; Butcher, E.; Furie, B.; Furie, B.; Gallatin, M.; Gimbrone, M.; Harlan, J.; Kishimoto, K.; Lasky, L.; McEver, R.; Paulson, J.; Rosen, S.; Seed, B.; Siegelman, M.; Springer, T.; Stoolman, L.; Tedder, T.; Varki, A.; Wagner, D.; Weissman, I.; Zimmerman, G.: Selectins: a family of adhesion receptors. (Letter) Cell 67: 233 only, 1991.
[8609] 2723. Bevilacqua, M. P.; Stengelin, S.; Gimbrone, M. A., Jr.; Seed, B.: Endothelial leukocyte adhesion molecule 1: an inducible receptor for neutrophils related to complement regulatory proteins and lectins. Science 243:1160-1165, 1989.
[8610] 2724. Collins, T.; Williams, A.; Johnston, G. I.; Kim, J.; Eddy, R.; Shows, T.; Gimbrone, M. A., Jr.; Bevilacqua, M. P.: Structure and chromosomal location of the gene for endothelial-leukocyte adhesion molecule 1. J. Biol. Chem. 266: 2466-2473, 1991.
[8611] 2725. DeLisser, H. M.; Christofidou-Solomidou, M.; Sun, J.; Nakada, M. T.; Sullivan, K. E.: Loss of endothelial surface expression of E-selectin in a patient with recurrent infections. Blood 94: 884-894, 1999.
[8612] 2726. Wang, N.; Chintala, S. K.; Fini, M. E.; Schuman, J. S.: Activation of a tissue-specific stress response in the aqueous outflow pathway of the eye defines the glaucoma disease phenotype. Nature Med. 7:304-309, 2001.
[8613] 2727. Watson, M. L.; Kingsmore, S. F.; Johnston, G. I.; Siegelman, M. H.; Le Beau, M. M.; Lemons, R. S.; Bora, N. S.; Howard, T. A.; Weissman, I. L.; McEver, R. P.; Seldin, M. F.: Genomic organization of the selectin family of leukocyte adhesion molecules on human and mouse chromosome 1. J. Exp. Med. 172: 263-272, 1990.
[8614] 2728. Wenzel, K.; Felix, S.; Kleber, F. X.; Brachold, R.; Menke, T.; Schattke, S.; Schulte, K. L.; Glaser, C.; Rohde, K.; Baumann, G.; Speer, A.: E-selectin polymorphism and atherosclerosis: an association study. Hum. Molec. Genet. 3: 1935-1937, 1994.
[8615] 2729. Zheng, F.; Chevalier, J. A.; Zhang, L. Q.; Virgil, D.; Ye, S. Q.; Kwiterovich, P. O.: An Hphl polymorphism in the E-selectin gene is associated with premature coronary artery disease. Clin. Genet. 59:58-64, 2001.
[8616] 2730. Eckenstein, F. P.: Fibroblast growth factors in the nervous system. J. Neurobiol. 25: 1467-1480, 1994.
[8617] 2731. Jung, J.; Zheng, M.; Goldfarb, M.; Zaret, K. S.: Initiation of mammalian liver development from endoderm by fibroblast growth factors. Science 284:1998-2003, 1999.
[8618] 2732. Mergia, A.; Eddy, R.; Abraham, J. A.; Fiddes, J. C.; Shows, T. B.: The genes for basic and acidic fibroblast growth factors are on different human chromosomes. Biochem. Biophys. Res. Commun. 138:644-651, 1986.
[8619] 2733. Plotnikov, A. N.; Hubbard, S. R.; Schlessinger, J.; Mohammadi, M.: Crystal structures of two FGF-FGFR complexes reveal the determinants of ligand-receptor specificity. Cell 101: 413-424, 2000.
[8620] 2734. Willecke, K.; Jungbluth, S.; Dahl, E.; Hennemann, H.; Heynkes, R.; Grzeschik, K.-H.: Six genes of the human connexin gene family coding for gap junctional proteins are assigned to four different human chromosomes. Europ. J. Cell Biol. 53: 275-280, 1990.
[8621] 2735. Oviedo-Orta, E.; Hoy, T.; Evans, W. H.: Intercellular communication in the immune system: differential expression of connexin 40 and 43, and perturbation of gap junction channel functions in peripheral blood and tonsil human lymphocyte subpopulations. Immunology 99: 578-590, 2000.
[8622] 2736. Britz-Cunningham, S. H.; Shah, M. M.; Zuppan, C. W.; Fletcher, W. H.: Mutations of the connexin 43 gap junction gene in patients with heart malformations and defects of laterality. New Eng. J. Med. 332:1323-1329, 1995.
[8623] 2737. Brueckner, M.; D'Eustachio, P.; Horwich, A. L.: Linkage mapping of a mouse gene, iv, that controls left-right asymmetry of the heart and viscera. Proc. Nat. Acad. Sci. 86: 5035-5038, 1989.
[8624] 2738. Burdine, R. D.; Schier, A. F.: Conserved and divergent mechanisms in left-right axis formation. Genes Dev. 14: 763-776, 2000.
[8625] 2739. Casey, B.; Ballabio, A.: Connexin 43 mutations in sporadic and familial defects of laterality. (Letter) New Eng. J. Med. 333: 941, 1995.
[8626] 2740. Corcos, I. A.; Meese, E. U.; Loch-Caruso, R.: Human connexin 43 gene locus, GJA1, sublocalized to band 6q21-q23.2. Cytogenet. Cell Genet. 64: 31-32, 1993.
[8627] 2741. Debrus, S.; Tuffery, S.; Matsuoka, R.; Galal, O.; Sarda, P.; Sauer, U.; Bozio, A.; Tanman, B.; Toutain, A.; Claustres, M.; Le Paslier, D.; Bouvagnet, P.: Lack of evidence for connexin 43 gene mutations in human autosomal recessive lateralization defects. J. Molec. Cell. Cardiol. 29: 1423-1431, 1997.
[8628] 2742. Wijnen, J. T.; Oldenburg, M.; Bloemendal, H.; Meera Khan, P.: GS(gamma-S)-crystallin (CRYGS) assignment to chromosome 3. (Abstract) Cytogenet. Cell Genet. 51: 1108 only, 1989.
[8629] 2743. Chen, L. Z.; Harris, P. C.; Apostolou, S.; Baker, E.; Holman, K.; Lane, S. A.; Nancarrow, J. K.; Whitmore, S. A.; Stallings, R. L.; Hildebrand, C. E.; Richards, R. I.; Sutherland, G. R.; Callen, D. F.: A refined physical map of the long arm of human chromosome 16. Genomics 10:308-312, 1991.
[8630] 2744. Albrecht, F. E.; Drago, J.; Felder, R. A.; Printz, M. P.; Eisner, G. M.; Robillard, J. E.; Sibley, D. R.; Westphal, H. J.; Jose, P. A.: Role of the D-1A dopamine receptor in the pathogenesis of genetic hypertension. J. Clin. Invest. 97: 2283-2288, 1996.
[8631] 2745. Bermak, J. C.; Li, M.; Bullock, C.; Zhou, Q.-Y.: Regulation of transport of the dopamine Dl receptor by a new membrane-associated ER protein. Nature Cell Biol. 3: 492-498, 2001.
[8632] 2746. Boultwood, J.; Lewis, M. S.; Wainscoat, J. S.: Physical linkage of glucocorticoid receptor (GRL) and dopamine Dl receptor (DRD1) on the long arm of chromosome 5. (Abstract) Cytogenet. Cell Genet. 58:1894 only, 1991.
[8633] 2747. Castner, S. A.; Williams, G. V.; Goldman-Rakic, P. S.: Reversal of antipsychotic-induced working memory deficits by short-term dopamine D1 receptor stimulation. Science 287: 2020-2022, 2000.
[8634] 2748. Dearry, A.; Gingrich, J. A.; Falardeau, P.; Fremeau, R. T., Jr.; Bates, M. D.; Caron, M. G.: Molecular cloning and expression of the gene for a human D(1) dopamine receptor. Nature 347: 72-76, 1990.
[8635] 2749. Grandy, D. K.; Zhou, Q.-Y.; Allen, L.; Litt, R.; Magenis, R. E.; Civelli, O.; Litt, M.: A human D(1) dopamine receptor gene is located on chromosome 5 at q35.1 and identifies an EcoRI RFLP. Am. J. Hum. Genet. 47: 828-834, 1990.
[8636] 2750. Krushkal, J.; Xiong, M.; Ferrell, R.; Sing, C. F.; Turner, S. T.; Boerwinkle, E.: Linkage and association of adrenergic and dopamine receptor genes in the distal portion of the long arm of chromosome 5 with systolic blood pressure variation. Hum. Molec. Genet. 7:1379-1383, 1998.
[8637] 2751. Mayerhofer, A.; Hemmings, H. C., Jr.; Snyder, G. L.; Greengard, P.; Boddien, S.; Berg, U.; Brucker, C.: Functional dopamine-1 receptors and DARPP-32 are expressed in human ovary and granulosa luteal cells in vitro. J. Clin. Endocr. Metab. 84: 257-264, 1999.
[8638] 2752. Sunahara, R. K.; Niznik, H. B.; Weiner, D. M.; Stormann, T. M.; Brann, M. R.; Kennedy, J. L.; Gelernter, J. E.; Rozmahel, R.; Yang, Y.; Israel, Y.; Seeman, P.; O'Dowd, B. F.: Human dopamine Dl receptor encoded by an intronless gene on chromosome 5. Nature 347: 80-83, 1990.
[8639] 2753. Wilkie, T. M.; Chen, Y.; Gilbert, D. J.; Moore, K. J.; Yu, L.; Simon, M. I.; Copeland, N. G.; Jenkins, N. A.: Identification, chromosomal location, and genome organization of mammalian G-protein-coupled receptors. Genomics 18:175-184, 1993.
[8640] 2754. Xu, M.; Moratalla, R.; Gold, L. H.; Hiroi, N.; Koob, G. F.; Graybiel, A. M.; Tonegawa, S.: Dopamine Dl receptor mutant mice are deficient in striatal expression of dynorphin and in dopamine-mediated behavioral responses. Cell 79: 729-742, 1994.
[8641] 2755. Zhou, Q.-Y.; Grandy, D. K.; Thambi, L.; Kushner, J. A.; Van Tol, H. H. M.; Cone, R.; Pribnow, D.; Salon, J.; Bunzow, J. R.; Civelli, O.: Cloning and expression of human and rat D(1) dopamine receptors. Nature 347:76-80, 1990.
[8642] 2756. Fan, Y.-S.; Eddy, R. L.; Byers, M. G.; Haley, L. L.; Henry, W. M.; Kayano, T.; Shows, T. B.; Bell, G. I.: Assignment of genes encoding three human glucose transporter/transporter-like proteins (GLUT4, GLUT5 and GLUT6) to chromosomes 17, 1 and 5, respectively. (Abstract) Cytogenet. Cell Genet. 51: 997 only, 1989.
[8643] 2757. Aitken, D. A.; Ferguson-Smith, M. A.: Gene dosage evidence for the regional assignment of the GOT-S structural gene locus to 10q24-10q25. Cytogenet. Cell Genet. 22: 468-471, 1978.
[8644] 2758. Creagan, R.; Tischfield, J.; McMorris, F. A.; Chen, S.-H.; Hirschi, M.; Chen, T.-T.; Ricciuti, F.; Ruddle, F. H.: Assignment of the genes for human peptidase A to chromosome 18 and cytoplasmic glutamic oxaloacetate-transaminase to chromosome 10 using somatic-cell hybrids. Cytogenet. Cell Genet. 12: 187-198, 1973.
[8645] 2759. Ford, G. C.; Eichele, G.; Jansonius, J. N.: Three-dimensional structure of a pyridoxal-phosphate-dependent enzyme, mitochondrial aspartate aminotransferase. Proc. Nat. Acad. Sci. 77: 2559-2563, 1980.
[8646] 2760. Gitelman, B. J.; Tomkins, D. J.; Partington, M. W.; Roberts, M. H.; Simpson, N. E.: Gene dosage studies of glutamic oxaloacetic transaminase (GOT) and hexokinase (HK) in two patients with possible partial trisomy10q. (Abstract) Am. J. Hum. Genet. 32: 41A only, 1980.
[8647] 2761. Junien, C.; Despoisse, S.; Turleau, C.; de Grouchy, J.; Bucher, T.; Fundele, R.: Assignment of phosphoglycerate mutase (PGAMA) to human chromosome 10: regional mapping of GOT1 and PGAMA to sub bands 10q26.1 (or q25.3). Ann. Genet. 25: 25-27, 1982.
[8648] 2762. Overhauser, J.; Mewar, R.; Rojas, K.; Lia, K.; Kline, A. D.; Silverman, G. A.: STS map of genes and anonymous DNA fragments on human chromosome 18 using a panel of somatic cell hybrids. Genomics 15: 387-391, 1993.
[8649] 2763. Koch, G.; Lalley, P. A.; McAvoy, M.; Shows, T. B.: Assignment of LIPA, associated with human acid lipase deficiency, to human chromosome 10 and comparative assignment to mouse chromosome 19. Somat. Cell Genet. 7: 345-358, 1981.
[8650] 2764. Asada, H.; Kawamura, Y.; Maruyama, K.; Kume, H.; Ding, R.-G.; Ji, F. Y.; Kanbara, N.; Kuzume, H.; Sanbo, M.; Yagi, T.; Obata, K.: Mice lacking the 65 kDa isoform of glutamic acid decarboxylase (GAD65) maintain normal levels of GAD67 and GABA in their brains but are susceptible to seizures. Biochem. Biophys. Res. Commun. 229: 891-895, 1996.
[8651] 2765. Bu, D.-F.; Erlander, M. G.; Hitz, B. C.; Tillakaratne, N. J. K.; Kaufman, D. L.; Wagner-McPherson, C. B.; Evans, G. A.; Tobin, A. J.: Two human glutamate decarboxylases, 65-kDa GAD and 67-kDa GAD, are each encoded by a single gene. Proc. Nat. Acad. Sci. 89: 2115-2119, 1992.
[8652] 2766. Edelhoff, S.; Grubin, C. E.; Karlsen, A. E.; Adler, D. A.; Foster, D.; Disteche, C. M.; Lernmark, A.: Mapping of glutamic acid decarboxylase (GAD) genes. Genomics 17: 93-97, 1993.
[8653] 2767. McKusick, V. A.: The morbid anatomy of the human genome: a review of gene mapping in clinical medicine (part 1). Medicine 65: 1-33, 1986.
[8654] 2768. Panteghini, M.: Aspartate aminotransferase isoenzymes. Clin. Biochem. 23: 311-319, 1990.
[8655] 2769. Pol, S.; Bousquet-Lemercier, B.; Pave-Preux, M.; Bulle, F.; Passage, E.; Hanoune, J.; Mattei, M. G.; Barouki, R.: Chromosomal localization of human aspartate aminotransferase genes by in situ hybridization. Hum. Genet. 83: 159-164, 1989.
[8656] 2770. Scott, E. M.; Wright, R. C.: An alternate method for demonstration of erythrocytic aminotransferases on starch gels. Am. J. Hum. Genet. 33:561-563, 1981.
[8657] 2771. Spritz, R. A.; Emanuel, B. S.; Chern, C. J.; Mellman, W. J.: Gene dosage effect: intraband mapping of human soluble glutamic oxaloacetic transaminase. Cytogenet. Cell Genet. 23: 149-156, 1979.
[8658] 2772. Tomkins, D. J.; Gitelman, B. J.; Roberts, M. H.: Confirmation of a de novo duplication, dup(10)(q24-q26), by GOT1 gene dosage studies. Hum. Genet. 63: 369-373, 1983.
[8659] 2773. Wang, C.-Y.; Huang, Y.-Q.; Shi, J.-O.; Marron, M. P.; Ruan, Q.-G.; Hawkins-Lee, B.; Ochoa, B.; She, J.-X.: Genetic homogeneity, high-resolution mapping, and mutation analysis of the urofacial (Ochoa) syndrome and exclusion of the glutamate oxaloacetate transaminase gene (GOT1) in the critical region as the disease gene. Am. J. Med. Genet. 84:454-459, 1999.
[8660] 2774. Wurzinger, K. H.; Mohrenweiser, H. W.: Studies on the genetic and non-genetic (physiological) variation of human erythrocyte glutamicoxaloacetic transaminase. Ann. Hum. Genet. 46: 191-201, 1982.
[8661] 2775. Abel, E. D.; Kaulbach, H. C.; Tian, R.; Hopkins, J. C. A.; Duffy, J.; Doetschman, T.; Minnemann, T.; Boers, M.-E.; Hadro, E.; Oberste-Berghaus, C.; Quist, W.; Lowell, B. B.; Ingwall, J. S.; Kahn, B. B.: Cardiachypertrophy with preserved contractile function after selective deletion of GLUT4 from the heart. J. Clin. Invest. 104: 1703-1714, 1999.
[8662] 2776. Abel, E. D.; Peroni, O.; Kim, J. K.; Kim, Y.-B.; Boss, O.; Hadro, E.; Minnemann, T.; Shulman, G. I.; Kahn, B. B.: Adipose-selective targeting of the GLUT4 gene impairs insulin action in muscle and liver. Nature 409:729-733, 2001.
[8663] 2777. Bell, G. I.; Kayano, T.; Buse, J. B.; Burant, C. F.; Takeda, J.; Lin, D.; Fukumoto, H.; Seino, S.: Molecular biology of mammalian glucose transporters. Diabetes Care 13: 198-208, 1990.
[8664] 2778. Bell, G. I.; Murray, J. C.; Nakamura, Y.; Kayano, T.; Eddy, R. L.; Fan, Y.-S.; Byers, M. G.; Shows, T. B.: Polymorphic human insulin-responsive glucose-transporter gene on chromosome 17p13. Diabetes 38: 1072-1075, 1989.
[8665] 2779. Birnbaum, M. J.: Identification of a novel gene encoding an insulin-responsive glucose transporter protein. Cell 57: 305-315, 1989.
[8666] 2780. Chiang, S.-H.; Baumann, C. A.; Kanzaki, M.; Thurmond, D. C.; Watson, R. T.; Neudauer, C. L.; Macara, I. G.; Pessin, J. E.; Saltiel, A. R.: Insulin-stimulated GLUT4 translocation requires the CAP-dependent activation of TC10. Nature 410: 944-948, 2001.
[8667] 2781. Garvey, W. T.; Maianu, L.; Zhu, J.-H.; Brechtel-Hook, G.; Wallace, P.; Baron, A. D.: Evidence for defects in the trafficking and translocation of GLUT4 glucose transporters in skeletal muscle as a cause of human insulin resistance. J. Clin. Invest. 101: 2377-2386, 1998.
[8668] 2782. Ikemoto, S.; Thompson, K. S.; Itakura, H.; Lane, M. D.; Ezaki, O.: Expression of an insulin-responsive glucose transporter (GLUT4) minigene in transgenic mice: effect of exercise and role in glucose homeostasis. Proc. Nat. Acad. Sci. 92: 865-869, 1995.
[8669] 2783. Katz, E. B.; Stenbit, A. E.; Hatton, K.; DePinho, R.; Charron, M. J.: Cardiac and adipose tissue abnormalities but not diabetes in mice deficient in GLUT4. Nature 377: 151-155, 1995.
[8670] 2784. Kusari, J.; Verma, U. S.; Buse, J. B.; Henry, R. R.; Olefsky, J. M.: Analysis of the gene sequences of the insulin receptor and the insulin-sensitive glucose transporter (GLUT-4) in patients with common-type non-insulin-dependent diabetes mellitus. J. Clin. Invest. 88:1323-1330, 1991.
[8671] 2785. Muraoka, A.; Sakura, H.; Kim, K.; Kishimoto, M.; Akanuma, Y.; Buse, J. B.; Yasuda, K.; Seino, S.; Bell, G. I.; Yazaki, Y.; Kasuga, M.; Kadowaki, T.: Polymorphism in exon 4a of the human GLUT4/muscle-fat facilitative glucose transporter gene detected by SSCP. Nucleic Acids Res. 19: 4313 only, 1991.
[8672] 2786. Ribon, V.; Printen, J. A.; Hoffman, N. G.; Kay, B. K.; Saltiel, A. R.: A novel, multifunctional c-Cbl binding protein in insulin receptor signaling in 3T3-L1 adipocytes. Molec. Cell. Biol. 18:872-879, 1998.
[8673] 2787. Zisman, A.; Peroni, O. D.; Abel, E. D.; Michael, M. D.; Mauvais-Jarvis, F.; Lowell, B. B.; Wojtaszewski, J. F. P.; Hirshman, M. F.; Virkamaki, A.; Goodyear, L. J.; Kahn, C. R.; Kahn, B. B.: Targeted disruption of the glucose transporter 4 selectively in muscle causes insulin resistance and glucose intolerance. Nature Med. 6: 924-928, 2000.
[8674] 2788. Fishman, G. I.; Eddy, R. L.; Shows, T. B.; Rosenthal, L.; Leinwand, L. A.: The human connexin gene family of gap junction proteins: distinct chromosomal locations but similar structures. Genomics 10: 250-256, 1991.
[8675] 2789. Fukushige, S.; Murotsu, T.; Matsubara, K.: Chromosomal assignment of human genes for gastrin, thyrotropin (TSH)-beta subunit and C-erb-2 by chromosome sorting combined with velocity sedimentation and southern hybridization. Biochem. Biophys. Res. Commun. 134: 477-483, 1986.
[8676] 2790. Justice, M. J.; Gilbert, D. J.; Kinzler, K. W.; Vogelstein, B.; Buchberg, A. M.; Ceci, J. D.; Matsuda, Y.; Chapman, V. M.; Patriotis, C.; Makris, A.; Tsichlis, P. N.; Jenkins, N. A.; Copeland, N. G.: A molecular genetic linkage map of mouse chromosome 18 reveals extensive linkage conservation with human chromosomes 5 and 18. Genomics 13:1281-1288, 1992.
[8677] 2791. Triantafilou, K.; Triantafilou, M.; Dedrick, R. L.: A CD14-independent LPS receptor cluster. Nature Immun. 2: 338-345, 2001.
[8678] 2792. Lamaze, C.; Dujeancourt, A.; Baba, T.; Lo, C. G.; Benmerah, A.; Dautry-Varsat, A.: Interleukin 2 receptors and detergent-resistant membrane domains define a clathrin-independent endocytic pathway. Molec. Cell 7: 661-671, 2001.
[8679] 2793. Eklund, L.; Piuhola, J.; Komulainen, J.; Sormunen, R.; Ongvarrasopone, C.; Fassler, R.; Muona, A.; Iives, M.; Ruskoaho, H.; Takala, T. E. S.; Pihlajaniemi, T.: Lack of type XV collagen causes a skeletal myopathy and cardiovascular defects in mice. Proc. Nat. Acad. Sci. 98:1194-1199, 2001.
[8680] 2794. Hagg, P. M.; Hagg, P. O.; Peltonen, S.; Autio-Harmainen, H.; Pihlajaniemi, T.: Location of type XV collagen in human tissues and its accumulation in the interstitial matrix of the fibrotic kidney. Am. J. Path. 150:2075-2086, 1997.
[8681] 2795. Hagg, P. M.; Horelli-Kuitunen, N.; Eklund, L.; Palotie, A.; Pihlajaniemi, T.: Cloning of mouse type XV collagen sequences and mapping of the corresponding gene to 4B1-3: comparison of mouse and human alpha-1(XV) collagen sequences indicates divergence in the number of small collagenous domains. Genomics 45: 31-41, 1997.
[8682] 2796. Hagg, P. M.; Muona, A.; Lietard, J.; Kivirikko, S.; Pihlajaniemi, T.: Complete exon-intron organization of the human gene for the alpha-1 chain of type XV collagen (COL15A1) and comparison with the homologous Col18a1 gene. J. Biol. Chem. 273: 17824-17831, 1998.
[8683] 2797. Huebner, K.; Cannizzaro, L. A.; Jabs, E. W.; Kivirikko, S.; Manzone, H.; Pihlajaniemi, T.; Myers, J. C.: Chromosomal assignment of a geneen coding a new collagen type (COL15A1) to 9q21-q22. Genomics 14:220-224, 1992.
[8684] 2798. Kivirikko, S.; Heinamaki, P.; Rehn, M.; Honkanen, N.; Myers, J. C.; Pihlajaniemi, T.: Primary structure of the alpha-1 chain of human type XV collagen and exon-intron organization in the 3-prime region of the corresponding gene. J. Biol. Chem. 269: 4773-4779, 1994.
[8685] 2799. Muragaki, Y.; Abe, N.; Ninomiya, Y.; Olsen, B. R.; Ooshima, A.: The human alpha-1(XV) collagen chain contains a large amino-terminal non-triple helical domain with a tandem repeat structure and homology to alpha-1(XVIII) collagen. J. Biol. Chem. 269: 4042-4046, 1994.
[8686] 2800. Myers, J. C.; Dion, A. S.; Abraham, V.; Amenta, P. S.: Type XV collagen exhibits a widespread distribution in human tissues but a distinct localization in basement membrane zones. Cell Tissue Res. 286:493-505, 1996.
[8687] 2801. Myers, J. C.; Kivirikko, S.; Gordon, M. K.; Dion, A. S.; Pihlajaniemi, T.: Identification of a previously unknown human collagen chain, alpha-1(XV), characterized by extensive interruptions in the triple-helical region. Proc. Nat. Acad. Sci. 89: 10144-10148, 1992.
[8688] 2802. Ramchandran, R.; Dhanabal, M.; Volk, R.; Waterman, M. J. F.; Segal, M.; Lu, H.; Knebelmann, B.; Sukhatme, V. P.: Antiangiogenic activity of rest in, NC10 domain of human collagen XV: comparison to endostatin. Biochem. Biophys. Res. Commun. 255: 735-739, 1999.
[8689] 2803. Rehn, M.; Hintikka, E.; Pihlajaniemi, T.: Primary structure of the alpha 1 chain of mouse type XVIII collagen, partial structure of the corresponding gene, and comparison of the alpha 1(XVIII) chain with its homologue, the alpha 1(XV) collagen chain. J. Biol. Chem. 269:13929-13935, 1994.
[8690] 2804. Sasaki, T.; Larsson, H.; Tisi, D.; Claesson-Welsh, L.; Hohenester, E.; Timpl, R.: Endostatins derived from collagens XV and XVIII differ in structural and binding properties, tissue distribution and anti-angiogenic activity. J. Molec. Biol. 301: 1179-1190, 2000.
[8691] 2805. Hulsebos, T. J. M.; Jenkins, N. A.; Gilbert, D. J.; Copeland, N. G.: The beta crystallin genes on human chromosome 22 define a new region of homology with mouse chromosome 5. Genomics 25: 574-576, 1995.
[8692] 2806. Lampi, K. J.; Ma, Z.; Shih, M.; Shearer, T. R.; Smith, J. B.; Smith, D. L.; David, L. L.: Sequence analysis of beta-A3, beta-B3, and beta-A4 crystallins completes the identification of the major proteins in young human lens. J. Biol. Chem. 272: 2268-2275, 1997.
[8693] 2807. van Rens, G.; Geurts van Kessel, A.; Bloemendal, H.: Localization of the beta-A4 crystallin (CRYBA4) gene on human chromosome 22 in the region q11.2-q13.1. (Abstract) Cytogenet. Cell Genet. 58: 2052 only, 1991.
[8694] 2808. van Rens, G. L. M.; Geurts van Kessel, A. H. M.; Bloemendal, H.: Localization of the beta-A4-crystallin gene (CRYBA4) on human chromosome 22 in the region q11.2-q13.1. Cytogenet. Cell Genet. 61: 180-183, 1992.
[8695] 2809. den Dunnen, J. T.; Jongbloed, R. J. E.; Geurts van Kessel, A. H. M.; Schoenmakers, J. G. G.: Human lens gamma-crystallin sequences are located in the p12-qter region of chromosome 2. Hum. Genet. 70:217-221, 1985.
[8696] 2810. Fajans, S. S.; Bell, G. I.; Polonsky, K. S.: Molecular mechanisms and clinical pathophysiology of maturity-onset diabetes of the young. New Eng. J. Med. 345: 971-980, 2001.
[8697] 2811. Wu, W. J.; Erickson, J. W.; Lin, R.; Cerione, R. A.: The gamma-subunit of the coatomer complex binds Cdc42 to mediate transformation. Nature 405:800-804, 2000.
[8698] 2812. Wunderle, V. M.; Critcher, R.; Hastie, N.; Goodfellow, P. N.; Schedl, A.: Deletion of long-range regulatory elements upstream of SOX9 causes campomelic dysplasia. Proc. Nat. Acad. Sci. 95: 10649-10654, 1998.
[8699] 2813. Young, I. D.; Zuccollo, J. M.; Maltby, E. L.; Broderick, N. J.: Campomelic dysplasia associated with a de novo 2q; 17q reciprocal translocation. J. Med. Genet. 29: 251-252, 1992.
[8700] 2814. Bard, L. A.: Heterogeneity in Waardenburg's syndrome: report of a family with ocular albinism. Arch. Ophthal. 96: 1193-1198, 1978.
[8701] 2815. Morell, R.; Spritz, R. A.; Ho, L.; Pierpont, J.; Guo, W.; Friedman, T. B.; Asher, J. H., Jr.: Apparent digenic inheritance of Waardenburg syndrome type 2 (WS2) and autosomal recessive ocular albinism (AROA). Hum. Molec. Genet. 6: 659-664, 1997.
[8702] 2816. Smith, S. D.; Kelley, P. M.; Kenyon, J. B.; Hoover, D.: Tietz syndrome (hypopigmentation/deafness) caused by mutation of MITF. J. Med. Genet. 37: 446-448, 2000.
[8703] 2817. Tietz, W.: A syndrome of deaf-mutism associated with albinism showing dominant autosomal inheritance. Am. J. Hum. Genet. 15: 259-264, 1963.
[8704] 2818. Hsieh, C.-L.; Kumar, N. M.; Gilula, N. B.; Francke, U.: Distribution of genes for gap junction membrane channel proteins on human and mouse chromosomes. Somat. Cell Molec. Genet. 17: 191-200, 1991.
[8705] 2819. DeStefano, A. L.; Baldwin, C. T.; Burzstyn, M.; Gavras, I.; Handy, D. E.; Joost, O.; Martel, T.; Nicolaou, M.; Schwartz, F.; Streeten, D. H. P.; Farrer, L. A.; Gavras, H.: Autosomal dominant orthostatichypotensive disorder maps to chromosome 18q. Am. J. Hum. Genet. 63:1425-1430, 1998.
[8706] 2820. Barnett, T.; Zimmermann, W.: Workshop report: proposed nomenclature for the carcinoembryonic antigen (CEA) gene family. Tumor Biol. 11:59-63, 1990.
[8707] 2821. Boulton, I. C.; Gray-Owen, S. D.: Neisserial binding to CEACAM1 arrests the activation and proliferation of CD4+ T lymphocytes. Nature Immun. 3: 229-236, 2002.
[8708] 2822. Ergun, S.; Kilic, N.; Ziegeler, G.; Hansen, A.; Nollau, P.; Gotze, J.; Wurmbach, J.-H.; Horst, A.; Weil, J.; Fernando, M.; Wagener, C.: CEA-related cell adhesion molecule 1: a potent angiogenic factor and a major effector of vascular endothelial growth factor. Molec. Cell 5: 311-320, 2000.
[8709] 2823. Hinoda, Y.; Neumaier, M.; Hefta, S. A.; Drzeniek, Z.; Wagener, C.; Shively, L.; Hefta, L. J. F.; Shively, J. E.; Paxton, R. J.: Molecular cloning of a cDNA coding biliary glycoprotein I: primary structure of a glycoprotein immunologically cross reactive with carcinoembryonic antigen. Proc. Nat. Acad. Sci. 85: 6959-6963, 1988.
[8710] 2824. Neumaier, M.; Paululat, S.; Chan, A.; Matthaes, P.; Wagener, C.: Biliary glycoprotein, a potential human cell adhesion molecule, is down-regulated in colorectal carcinomas. Proc. Nat. Acad. Sci. 90:10744-10748, 1993.
[8711] 2825. Poy, M. N.; Yang, Y.; Rezaei, K.; Fernstrom, M. A.; Lee, A. D.; Kido, Y.; Erickson, S. K.; Najjar, S. M.: CEACAM1 regulates insulin clearance in liver. Nature Genet. 30: 270-276, 2002.
[8712] 2826. Robbins, J.; Robbins, P. F.; Kozak, C. A.; Callahan, R.: The mouse biliary glycoprotein gene (Bgp): partial nucleotide sequence, expression, and chromosomal assignment. Genomics 10: 583-587, 1991.
[8713] 2827. Thompson, J. A.; Grunert, F.; Zimmermann, W.: Carcinoembryonic antigen gene family: molecular biology and clinical perspectives. J. Clin. Lab. Anal. 5: 344-366, 1991.
[8714] 2828. Bierhuizen, M. F. A.; Mattei, M.-G.; Fukuda, M.: Expression of the developmental I antigen by a cloned human cDNA encoding a member of a beta-1,6-N-acetylglucosaminyltransferase gene family. Genes Dev. 7: 468-478, 1993.
[8715] 2829. Lin-Chu, M.; Broadberry, R. E.; Okubo, Y.; Tanaka, M.: The i phenotype and congenital cataracts among Chinese in Taiwan (Letter) Transfusion 31:676-677, 1991.
[8716] 2830. Ogata, H.; Okubo, Y.; Akabane, T.: Phenotype i associated with congenital cataract in Japanese. Transfusion 19: 166-168, 1979.
[8717] 2831. Yeh, J.-C.; Ong, E.; Fukuda, M.: Molecular cloning and expression of a novel beta-1,6-N-acetylglucosaminyltransferase that forms core 2, core 4, and I branches. J. Biol. Chem. 274: 3215-3221, 1999.
[8718] 2832. Yu, L.-C.; Twu, Y.-C.; Chang, C.-Y.; Lin, M.: Molecular basis of the adult i phenotype and the gene responsible for the expression of the human blood group I antigen. Blood 98: 3840-3845, 2001.
[8719] 2833. Tommerup, N.; Schempp, W.; Meinecke, P.; Pedersen, S.; Bolund, L.; Brandt, C.; Goodpasture, C.; Guldberg, P.; Held, K.; Reinwein, H.; Saugstad, O. D.; Scherer, G.; Skjeldal, O.; Toder, R.; Westvik, J.; van der Hagen, C. B.; Wolf, U.: Assignment of an autosomal sexreversal locus (SRA1) and campomelic dysplasia (CMPD1) to 17q24.3-q25.1. Nature Genet. 4: 170-174, 1993.
[8720] 2834. Azuma, N.; Nishina, S.; Yanagisawa, H.; Okuyama, T.; Yamada, M.: PAX6 missense mutation in isolated foveal hypoplasia. (Letter) Nature Genet. 13: 141-142, 1996.
[8721] 2835. Curran, R. E.; Robb, R. M.: Isolated foveal hypoplasia. Arch. Ophthal. 94: 48-50, 1976.
[8722] 2836. O'Donnell, F. E., Jr.; Pappas, H. R.: Autosomal dominant foveal hypoplasia and presenile cataracts: a new syndrome. Arch. Ophthal. 100:279-281, 1982.
[8723] 2837. Angle, C. R.: Congenital bowing and angulation of the long bones. Pediatrics 13:257-268, 1954.
[8724] 2838. Bain, A. D.; Barrett, H. S.: Congenital bowing of the long bones: report of a case. Arch. Dis. Child. 34: 516-524, 1959.
[8725] 2839. Bell, D. M.; Leung, K. K. H.; Wheatley, S. C.; Ng, L. J.; Zhou, S.; Ling, K. W.; Sham, M. H.; Koopman, P.; Tam, P. P. L.; Cheah, K. S. E.: SOX9 directly regulates the type-II collagen gene. Nature Genet. 16: 174-178, 1997.
[8726] 2840. Bi, W.; Huang, W.; Whitworth, D. J.; Deng, J. M.; Zhang, Z.; Behringer, R. R.; de Crombrugghe, B.: Haploin-sufficiency of Sox9 results in defective cartilage primordia and premature skeletal mineralization. Proc. Nat. Acad. Sci. 98: 6698-6703, 2001.
[8727] 2841. Bishop, C. E.; Whitworth, D. J.; Qin, Y.; Agoulnik, A. I.; Agoulnik, I. U.; Harrison, W. R.; Behringer, R. R.; Overbeek, P. A.: A transgenic insertion upstream of Sox9 is associated with dominant XX sex reversal in the mouse. Nature Genet. 26: 490-494, 2000.
[8728] 2842. Caffey, J. P.: Prenatal bowing and thickening of tubular bones, with multiple cutaneous dimples in arms and legs: a congenital syndrome of mechanical origin. Am. J. Dis. Child. 74: 543-562, 1947.
[8729] 2843. Cameron, F. J.; Hageman, R. M.; Cooke-Yarborough, C.; Kwok, C.; Goodwin, L. L.; Sillence, D. O.; Sinclair, A. H.: A novel germ line mutation in SOX9 causes familial campomelic dysplasia and sex reversal. Hum. Molec. Genet. 5: 1625-1630, 1996.
[8730] 2844. Cameron, F. J.; Sinclair, A. H.: Mutations in SRY and SOX9: testis-determining genes. Hum. Mutat. 9: 388-395, 1997.
[8731] 2845. Cooke, C. T.; Mulcahy, M. T.; Cullity, G. J.; Watson, M.; Sprague, P.: Campomelic dysplasia with sex reversal: morphological and cytogenetic studies of a case. Pathology 17: 526-529, 1985.
[8732] 2846. Cremin, B. J.; Orsmond, G.; Beighton, P.: Autosomal recessive inheritance in camptomelic dwarfism. (Letter) Lancet I: 488-489, 1973.
[8733] 2847. Dagna Bricarelli, F.; Fraccaro, M.; Lindsten, J.; Muller, U.; Baggio, P.; Carbone, L. D. L.; Hjerpe, A.; Lindgren, F.; Mayerova, A.; Ringertz, H.; Ritzen, E. M.; Rovetta, D. C.; Sicchero, C.; Wolf, U.: Sex-reversed XY females with campomelic dysplasia are H-Y negative. Hum. Genet. 57: 15-22, 1981.
[8734] 2848. Ebensperger, C.; Jager, R. J.; Lattermann, U.; Dagna Bricarelli, F.; Keutel, J.; Lindsten, J.; Rehder, H.; Muller, U.; Wolf, U.: Noevidence of mutations in four candidate genes for male sex determination/differentiation in sex-reversed XY females with campomelic dysplasia. Ann. Genet. 34:233-238, 1991.
[8735] 2849. Fontaine, G.; Walbaum, R.; Farriaux, J. P.; Tilmont, P.; Peuzin, F.; Delecour, M.: Le conseil genetique dans la dysplasie campomelique (a propos de deux observations). J. Genet. Hum. 28: 267-279, 1980.
[8736] 2850. Foster, J. W.; Dominguez-Steglich, M. A.; Guioli, S.; Kwok, C.; Weller, P. A.; Stevanovic, M.; Weissenbach, J.; Mansour, S.; Young, I. D.; Goodfellow, P. N.; Brook, J. D.; Schafer, A. J.: Campomelic dysplasia and autosomal sex reversal caused by mutations in an SRY-related gene. Nature 372: 525-530, 1994.
[8737] 2851. Friedrich, U.; Schaefer, E.; Meinecke, P.: Campomelic dysplasia without overt campomelia. Clin. Dysmorph. 1: 172-178, 1992.
[8738] 2852. Gasca, S.; Canizares, J.; de Santa Barbara, P.; Mejean, C.; Poulat, F.; Berta, P.; Boizet-Bonhoure, B.: A nuclear export signal within the high mobility group domain regulates the nucleocytoplasmic translocation of SOX9 during sexual determination. Proc. Nat. Acad. Sci. 99: 11199-11204, 2002.
[8739] 2853. Glass, R. B. J.; Rosenbaum, K. N.: A campomelic campomelic dysplasia: further radiographic variations. Am. J. Med. Genet. 69: 29-32, 1997.
[8740] 2854. Hall, B.; Spranger, J. W.: Campomelic dysplasia: further elucidation of a distinct entity. Am. J. Dis. Child. 134: 285-289, 1980.
[8741] 2855. Hoefnagel, D.; Wurster-Hill, D. H.; Dupree, W. B.; Benirschke, K.; Fuld, G. L.: Camptomelic dwarfism associated with XY-gonadaldysgenesis and chromosome anomalies. Clin. Genet. 13: 489-499, 1978.
[8742] 2856. Houston, C. S.; Opitz, J. M.; Spranger, J. W.; Macpherson, R. I.; Reed, M. H.; Gilbert, E. F.; Herrmann, J.; Schinzel, A.: The campomelic syndrome: review, report of 17 cases, and follow-up on the currently 17-year-old boy first reported by Maroteaux et al in 1971. Am. J. Med. Genet. 15: 3-28, 1983.
[8743] 2857. Hovmoller, M. L.; Osuna, A.; Eklof, O.; Fredga, K.; Hjerpe, A.; Lindsten, J.; Ritzen, M.; Stanescu, V.; Svenningsen, N.: Camptomelicdwarfism. A genetically determined mesenchymal disorder combined with sex reversal. Hereditas 86: 51-62, 1977.
[8744] 2858. Huang, W.; Chung, U.; Kronenberg, H. M.; de Crombrugghe, B.: The chondrogenic transcription factor Sox9 is a target of signaling by the parathyroid hormone-related peptide in the growth plate of endochondral bones. Proc. Nat. Acad. Sci. 98: 160-165, 2001.
[8745] 2859. Kanai, Y.; Koopman, P.: Structural and functional characterization of the mouse Sox9 promoter: implications for campomelic dysplasia. Hum. Molec. Genet. 8: 691-696, 1999.
[8746] 2860. Medema, R. H.; Kops, G. J. P. L.; Bos, J. L.; Burgering, B. M. T.: AFX-like fork head transcription factors mediate cell-cycle regulation by Ras and PKB through p27(kipl). Nature 404: 782-787, 2000.
[8747] 2861. Bourgeois, C.; Robert, B.; Rebourcet, R.; Mondon, F.; Mignot, T.-M.; Duc-Goiran, P.; Ferre, F.: Endothelin-1 and ET(A) receptor expression in vascular smooth muscle cells from human placenta: a new ET(A) receptor messenger ribonucleic acid is generated by alternative splicing of exon 3. J. Clin. Endocr. Metab. 82: 3116-3123, 1997.
[8748] 2862. Amato, F.; Warnes, G. M.; Kirby, C. A.; Norman, R. J.: Infertility caused by hCG autoantibody. J. Clin. Endocr. Metab. 87: 993-997, 2002.
[8749] 2863. Naylor, S. L.; Chin, W. W.; Goodman, H. M.; Lalley, P. A.; Grzeschik, K.-H.; Sakaguchi, A. Y.: Chromosome assignment of the genes encoding the alpha and beta subunits of the glycoprotein hormones in man and mouse. Somat. Cell Genet. 9: 757-770, 1983.
[8750] 2864. Mammarella, S.; Romano, F.; Di Valerio, A.; Creati, B.; Esposito, D. L.; Palmirotta, R.; Capani, F.; Vitullo, P.; Volpe, G.; Battista, P.; Della Loggia, F.; Mariani-Costantini, R.; Cama, A.: Interaction between the G1057D variant of IRS-2 and overweight in the pathogenesis of type 2 diabetes. Hum. Molec. Genet. 9: 2517-2521, 2000.
[8751] 2865. Barker, P. E.; Shipp, M. A.; D'Adamio, L.; Masteller, E. L.; Reinherz, E. L.: The common acute lymphoblastic leukemia antigen gene maps to chromosomal region 3(q21-q27). J. Immun. 142: 283-287, 1989.
[8752] 2866. D'Adamio, L.; Shipp, M. A.; Masteller, E. L.; Reinherz, E. L.: Organization of the gene encoding common acute lymphoblastic leukemia antigen (neutral endopeptidase 24.11): multiple miniexons and separate 5-prime untranslated regions. Proc. Nat. Acad. Sci. 86: 7103-7107, 1989.
[8753] 2867. Debiec, H.; Guigonis, V.; Mougenot, B.; Decobert, F.; Haymann, J.-P.; Bensman, A.; Deschenes, G.; Ronco, P. M.: Antenatal membranous glomerulonephritis due to antineutral endopeptidase antibodies. New Eng. J. Med. 346: 2053-2060, 2002.
[8754] 2868. Letarte, M.; Vera, S.; Tran, R.; Addis, J. B. L.; Onizuka, R. J.; Quackenbush, E. J.; Jongeneel, C. V.; McInnes, R. R.: Common acute lymphocytic leukemia antigen is identical to neutral endopeptidase. J. Exp. Med. 168: 1247-1253, 1988.
[8755] 2869. Shipp, M. A.; Vijayaraghavan, J.; Schmidt, E. V.; Masteller, E. L.; D'Adamio, L.; Hersh, L. B.; Reinherz, E. L.: Common acute lymphoblastic leukemia antigen (CALLA) is active neutral endopeptidase 24.11 (‘enkephalinase’): direct evidence by cDNA transfection analysis. Proc. Nat. Acad. Sci. 86:297-301, 1989.
[8756] 2870. Tran-Paterson, R.; Willard, H. F.; Letarte, M.: The common acute lymphoblastic leukemia antigen (neutral endopeptidase—3.4.24.11) gene is located on human chromosome 3. Cancer Genet. Cytogenet. 42:129-134, 1989.
[8757] 2871. Lahn, B. T.; Page, D. C.: Four evolutionary strata on the human X chromosome. Science 286: 964-967, 1999.
[8758] 2872. Lee, F. A.; Issacs, H.; Strauss, J.: The ‘camptomelic’ syndrome. Short life-span dwarfism with respiratory distress, hypotonia, peculiarfacies, and multiple skeletal and cartilaginous deformities. Am. J. Dis. Child. 124: 485-496, 1972.
[8759] 2873. Lynch, S. A.; Gaunt, M. L.; Minford, A. M. B.: Campomelic dysplasia: evidence of autosomal dominant inheritance. J. Med. Genet. 30: 683-686, 1993.
[8760] 2874. Macpherson, R. I.; Skinner, S. A.; Donnenfeld, A. E.: A campomelic campomelic dysplasia. Pediat. Radiol. 20: 90-93, 1989.
[8761] 2875. Mansour, S.; Hall, C. M.; Pembrey, M. E.; Young, I. D.: A clinical and genetic study of campomelic dysplasia. J. Med. Genet. 32: 415-420, 1995.
[8762] 2876. Maraia, R.; Saal, H. M.; Wangsa, D.: A chromosome 17q de novoparacentric inversion in a patient with campomelic dysplasia; casereport and etiologic hypothesis. Clin. Genet. 39: 401-408, 1991.
[8763] 2877. Maroteaux, P.; Spranger, J. W.; Opitz, J. M.; Kucera, J.; Lowry, R. B.; Schimke, R. N.; Kagan, S. M.: Le syndrome campomelique. Presse Med. 22: 1157-1162, 1971.
[8764] 2878. Meyer, J.; Sudbeck, P.; Held, M.; Wagner, T.; Schmitz, M. L.; Bricarelli, F. D.; Eggermont, E.; Friedrich, U.; Haas, O. A.; Kobelt, A.; Leroy, J. G.; van Maldergem, L.; Michel, E.; Mitulla, B.; Pfeiffer, R. A.; Schinzel, A.; Schmidt, H.; Scherer, G.: Mutational analysis of the SOX9 gene in campomelic dysplasia and autosomal sex reversal: lack of genotype/phenotype correlations. Hum. Molec. Genet. 6: 91-98, 1997.
[8765] 2879. Moedjono, S. J.; Crandall, B. F.; Sparkes, R. S.; Feldman, G. M.; Austin, G. E.; Perry, S.: The campomelic syndrome in a singleton and monozygotic twins. Clin. Genet. 18: 397-401, 1980.
[8766] 2880. Moog, U.; Jansen, N. J. G.; Scherer, G.; Schrander-Stumpel, C. T. R. M.: A campomelic campomelic syndrome. Am. J. Med. Genet. 104:239-245, 2001.
[8767] 2881. Morais da Silva, S.; Hacker, A.; Harley, V.; Goodfellow, P.; Swain, A.; Lovell-Badge, R.: Sox9 expression during gonadal development implies a conserved role for the gene in testis differentiation in mammals and birds. Nature Genet. 14: 62-68, 1996.
[8768] 2882. Murakami, S.; Kan, M.; McKeehan, W. L.; de Crombrugghe, B.: Up-regulation of the chondrogenic Sox9 gene by fibroblast growth factors is mediated by the mitogen-activated protein kinase pathway. Proc. Nat. Acad. Sci. 97: 1113-1118, 2000.
[8769] 2883. Ninomiya, S.; Isomura, M.; Narahara, K.; Seino, Y.; Nakamura, Y.: Isolation of a testis-specific cDNA on chromosome 17q from a region adjacent to the breakpoint of t(12;17) observed in a patient with acampomelic campomelic dysplasia and sex reversal. Hum. Molec. Genet. 5: 69-72, 1996.
[8770] 2884. Ninomiya, S.; Yokoyama, Y.; Teraoka, M.; Mori, R.; Inoue, C.; Yamashita, S.; Tamai, H.; Funato, M.; Seino, Y.: A novel mutation (296 del G) of the SOX9 gene in a patient with campomelic syndrome and sex reversal. Clin. Genet. 58: 224-227, 2000.
[8771] 2885. Olney, P. N.; Kean, L. S.; Graham, D.; Elsas, L. J.; May, K. M.: Campomelic syndrome and deletion of SOX9. Am. J. Med. Genet. 84:20-24, 1999.
[8772] 2886. Ozkilic, A.; Seven, M.; Yuksel, A.: A case of acampomelic campomelicdysplasia. Genet. Counsel. 13: 23-28, 2002.
[8773] 2887. Patel, M.; Dorman, K. S.; Zhang, Y.-H.; Huang, B.-L.; Arnold, A. P.; Sinsheimer, J. S.; Vilain, E.; McCabe, E. R. B.: Primate DAX1, SRY, and SOX9: evolutionary stratification of sex-determination pathway. Am. J. Hum. Genet. 68: 275-280, 2001.
[8774] 2888. Pfeifer, D.; Kist, R.; Dewar, K.; Devon, K.; Lander, E. S.; Birren, B.; Korniszewski, L.; Back, E.; Scherer, G.: Campomelic dysplasia translocation breakpoints are scattered over 1 Mb proximal to SOX9: evidence for an extended control region. Am. J. Hum. Genet. 65:111-124, 1999.
[8775] 2889. Puck, S. M.; Haseltine, F. P.; Francke, U.: Absence of H-Y antigen in an XY female with campomelic dysplasia. Hum. Genet. 57: 23-27, 1981.
[8776] 2890. Rimoin, D. L.: Personal Communication. Torrance, Calif. Aug. 12, 1976.
[8777] 2891. Rodriguez, J. I.: Vascular anomalies in campomelic syndrome. Am. J. Med. Genet. 46: 185-192, 1993.
[8778] 2892. Savarirayan, R.; Bankier, A.: A campomelic campomelic dysplasia with de novo 5q;17q reciprocal translocation and severe phenotype. J. Med. Genet. 35: 597-599, 1998.
[8779] 2893. Schimke, R. N.: XY sex-reversed campomelia-possibly an X-linked disorder? (Letter) Clin. Genet. 16: 62-63, 1979.
[8780] 2894. Shafai, T.; Schwartz, L.: Camptomelic syndrome in siblings. J. Pediat. 89: 512-513, 1976.
[8781] 2895. Spranger, J.: Advances in bone dysplasias. (Abstract) Sixth Int. Cong. Hum. Genet. Jerusalem, 1981.
[8782] 2896. Stuve, A.; Wiedemann, H.-R.: Congenital bowing of the long bones in two sisters. (Letter) Lancet I: 495, 1971.
[8783] 2897. Sudbeck, P.; Schmitz, M. L.; Baeuerle, P. A.; Scherer, G.: Sex reversal by loss of the C-terminal transactivation domain of human SOX9. Nature Genet. 13: 230-232, 1996.
[8784] 2898. Thong, M.-K.; Scherer, G.; Kozlowski, K.; Haan, E.; Morris, L.: A campomelic campomelic dysplasia with SOX9 mutation. Am. J. Med. Genet. 93: 421-425, 2000.
[8785] 2899. Thurmon, T. F.; De Fraites, E. B.; Anderson, E. E.: Familialcampomelic dwarfism. J. Pediat. 83: 841-843, 1973.
[8786] 2900. Vidal, V. P. I.; Chaboissier, M.-C.; de Rooij, D. G.; Schedl, A.: Sox9 induces testis development in XX transgenic mice. Nature Genet. 28: 216-217, 2001.
[8787] 2901. Wagner, T.; Wirth, J.; Meyer, J.; Zabel, B.; Held, M.; Zimmer, J.; Pasantes, J.; Dagna Bricarelli, F.; Keutel, J.; Hustert, E.; Wolf, U.; Tommerup, N.; Schempp, W.; Scherer, G.: Autosomal sex reversal and campomelic dysplasia are caused by mutations in and around the SRY-related gene SOX9. Cell 79: 1111-1120, 1994.
[8788] 2902. Weller, S. D. V.: Hypophosphatasia with congenital dimples. Proc. Roy. Soc. Med. 52: 637, 1959.
[8789] 2903. Wirth, J.; Wagner, T.; Meyer, J.; Pfeiffer, R. A.; Tietze, H.-U.; Schempp, W.; Scherer, G.: Translocation breakpoints in three patients with campomelic dysplasia and autosomal sex reversal map more than 130 kb from SOX9. Hum. Genet. 97: 186-193, 1996.
[8790] 2904. Wright, E.; Hargrave, M. R.; Christiansen, J.; Cooper, L.; Kun, J.; Evans, T.; Gangadharan, U.; Greenfield, A.; Koopman, P.: The Sry-related gene Sox9 is expressed during chondrogenesis in mouse embryos. Nature Genet. 9: 15-20, 1995.
[8791] 2905. Gillessen-Kaesbach, G.; Demuth, S.; Thiele, H.; Theile, U.; Lich, C.; Horsthemke, B.: A previously unrecognised phenotype characterised by obesity, muscular hypotonia, and ability to speak in patients with Angelman syndrome caused by an imprinting defect. Europ. J. Hum. Genet. 7: 638-644, 1999.
[8792] 2906. Acosta, J.; Hettinga, J.; Fluckiger, R.; Krumrei, N.; Goldfine, A.; Angarita, L.; Halperin, J.: Molecular basis for a link between complement and the vascular complications of diabetes. Proc. Nat. Acad. Sci. 97: 5450-5455, 2000.
[8793] 2907. Bickmore, W. A.; Longbottom, D.; Oghene, K.; Fletcher, J. M.; van Heyningen, V.: Colocalization of the human CD59 gene to 11p13 with the MIC11 cell surface antigen. Genomics 17: 129-135, 1993.
[8794] 2908. Davies, A.; Simmons, D. L.; Hale, G.; Harrison, R. A.; Tighe, H.; Lachmann, P. J.; Waldmann, H.: CD59, an LY-6-like protein expressed in human lymphoid cells, regulates the action of the complement membrane attack complex on homologous cells. J. Exp. Med. 170: 637-654, 1989.
[8795] 2909. Forsberg, U. H.; Bazil, V.; Stefanova, I.; Schroder, J.: Gene for human CD59 (likely Ly-6 homologue) is located on the short arm of chromosome 11. Immunogenetics 30: 188-193, 1989.
[8796] 2910. Harada, R.; Okada, N.; Fujita, T.; Okada, H.: Purification of 1F5 antigen that prevents complement attack on homologous cell membranes. J. Immun. 144: 1823-1828, 1990.
[8797] 2911. Heckl-Ostreicher, B.; Ragg, S.; Drechsler, M.; Scherthan, H.; Royer-Pokora, B.: Localization of the human CD59 gene by fluorescence in situ hybridization and pulsed-field gel electrophoresis. Cytogenet. Cell Genet. 63:144-146, 1993.
[8798] 2912. Holt, D. S.; Botto, M.; Bygrave, A. E.; Hanna, S. M.; Walport, M. J.; Morgan, B. P.: Targeted deletion of the CD59 gene causes spontaneous intravascular hemolysis and hemoglobinuria. Blood 98: 442-449, 2001.
[8799] 2913. Holt, D. S.; Powell, M. B.; Rushmere, N. K.; Morgan, B. P.: Genomic structure and chromosome location of the gene encoding mouse CD59. Cytogenet. Cell Genet. 89: 264-267, 2000.
[8800] 2914. Huppi, K.; Duncan, R.; Potter, M.: Myc-1 is centromeric to the linkage group Ly-6-Sis-Gdc-1 on mouse chromosome 15. Immunogenetics 27:215-219, 1988.
[8801] 2915. Kamiura, S.; Nolan, C. M.; Meruelo, D.: Long-range physical map of the Ly-6 complex: mapping the Ly-6 multigene family by field-inversion and two-dimensional gel electrophoresis. Genomics 12: 89-105, 1992.
[8802] 2916. Low, M. G.; Saltiel, A. R.: Structural and functional roles of glycosyl-phosphatidylinositol in membranes. Science 239: 268-275, 1988.
[8803] 2917. Mahoney, J. F.; Urakaze, M.; Hall, S.; DeGasperi, R.; Chang, H.-M.; Sugiyama, E.; Warren, C. D.; Borowitz, M.; Nicholson-Weller, A.; Rosse, W. F.; Yeh, E. T. H.: Defective glycosylphosphatidyl inositol anchor synthesis in paroxysmal nocturnal hemoglobinuria granulocytes. Blood 79:1400-1403, 1992.
[8804] 2918. Mao, M.; Yu, M.; Tong, J.-H.; Ye, J.; Zhu, J.; Huang, Q.-H.; Fu, G.; Yu, L.; Zhao, S.-Y.; Waxman, S.; Lanotte, M.; Wang, Z.-Y.; Tan, J.-Z.; Chan, S.-J.; Chen, Z.: RIG-E, a human homolog of the murine Ly-6 family, is induced by retinoic acid during the differentiation of acute promyelocytic leukemia cell. Proc. Nat. Acad. Sci. 93:5910-5914, 1996.
[8805] 2919. Meri, S.; Morgan, B. P.; Davies, A.; Daniels, R. H.; Olavesen, M. G.; Waldmann, H.; Lachmann, P. J.: Human protect in (CD59), an 18,000 MW complement lysis restricting factor, inhibits C5b-8 catalysed insertion of C9 into lipid bilayers. Immunology 71: 1-9, 1990.
[8806] 2920. Meri, S.; Morgan, B. P.; Wing, M.; Jones, J.; Davies, A.; Podack, E.; Lachmann, P. J.: Human protectin (CD59), an 18-20-kD homologous complement restriction factor, does not restrict perforin-mediated lysis. J. Exp. Med. 172: 367-370, 1990.
[8807] 2921. Motoyama, N.; Okada, N.; Yamashina, M.; Okada, H.: Paroxysmal nocturnal hemoglobinuria due to hereditary nucleotide deletion in the HRF20 (CD59) gene. Europ. J. Immun. 22: 2669-2673, 1992.
[8808] 2922. Okada, N.; Harada, R.; Fujiita, T.; Okada, H.: A novel membrane glycoprotein capable of inhibiting membrane attack by homologous complement. Int. Immun. 1: 205-208, 1989.
[8809] 2923. Szpirer, C.; Riviere, M.; Cortese, R.; Nakamura, T.; Islam, M. Q.; Levan, G.; Szpirer, J.: Chromosomal localization in man and rat of the genes encoding the liver-enriched transcription factors C/EBP, DBP, and HNF1/LFB-1 (CEBP, DBP, and transcription factor 1, TCF1, respectively) and of the hepatocyte growth factor/scatter factor gene (HGF). Genomics 13: 293-300, 1992.
[8810] 2924. Boorstein, W. R.; Vamvakopoulos, N. C.; Fiddes, J. C.: Human chorionicgon adotropin beta-subunit is encoded by at least eight genes arranged in tandem and inverted pairs. Nature 300: 419-422, 1982.
[8811] 2925. Fiddes, J. C.; Goodman, H. M.: The cDNA for the beta-subunit ofhuman chorionic gonadotropin suggests evolution of a gene by read through into the 3-prime-untranslated region. Nature 286: 684-687, 1980.
[8812] 2926. Graham, M. Y.; Otani, T.; Boime, I.; Olson, M. V.; Carle, G. F.; Chaplin, D. D.: Cosmid mapping of the human chorionic gonadotropin beta subunit genes by field-inversion gel electrophoresis. Nucleic Acids Res. 15: 4437-4448, 1987.
[8813] 2927. Julier, C.; Weil, D.; Couillin, P.; Cote, J. C.; Boue, A.; Thririon, J. P.; Kaplan, J. C.; Junien, C.: Confirmation of the assignment of the genes coding for human chorionic gonadotropin beta subunit to chromosome 19. (Abstract) Cytogenet. Cell Genet. 37: 501-502, 1984.
[8814] 2928. Julier, C.; Weil, D.; Couillin, P.; Cote, J. C.; Van Cong, N.; Foubert, C.; Boue, A.; Thirion, J. P.; Kaplan, J. C.; Junien, C.: The beta chorionic gonadotropin-beta luteinizing gene cluster maps to human chromosome 19. Hum. Genet. 67: 174-177, 1984.
[8815] 2929. Lunardi-Iskander, Y.; Bryant, J. L.; Zeman, R. A.; Lam, V. H.; Samaniego, F.; Besnier, J. M.; Hermans, P.; Thierry, A. R.; Gill, P.; Gallo, R. C.: Tumorigenesis and metastasis of neoplastic Kaposi'ssarcoma cell line in immunodeficient mice blocked by a human pregnancy hormone. Nature 375: 64-68, 1995.
[8816] 2930. Policastro, P.; Ovitt, C. E.; Hoshina, M.; Fukuoka, H.; Boothby, M. R.; Biome, I.: The beta-subunit of human chorionic gonadotropin is encoded by multiple genes. J. Biol. Chem. 258: 11492-11499, 1983.
[8817] 2931. Policastro, P. F.; Daniels-McQueen, S.; Carle, G.; Boime, I.: A map of the hCG-beta-LH-beta gene cluster. J. Biol. Chem. 261:5907-5916, 1986.
[8818] 2932. Talmadge, K.; Vamvakopoulos, N. C.; Fiddes, J. C.: Evolution of the genes for the beta subunits of human chorionic gonadotropin and luteinizing hormone. Nature 307: 37-40, 1984.
[8819] 2933. Warburton, D.; Gersen, S.; Yu, M.-T.; Jackson, C.; Handelin, B.; Housman, D.: Monochromosomal rodent-human hybrids from microcell fusion of human lymphoblastoid cells containing an inserted dominant selectable marker. Genomics 6: 358-366, 1990.
[8820] 2934. Seri, M.; Celli, I.; Betsos, N.; Claudiani, F.; Camera, G.; Romeo, G.: A cys634gly substitution of the RET protooncogene in a family with recurrence of multiple endocrine neoplasia type 2A and cutaneous lichen amyloidosis. Clin. Genet. 51: 86-90, 1997.
[8821] 2935. Hofstra, R. M. W.; Sijmons, R. H.; Stelwagen, T.; Stulp, R. P.; Kousseff, B. G.; Lips, C. J. M.; Steijlen, P. M.; Van Voorst Vader, P. C.; Buys, C. H. C. M.: RET mutation screening in familial cutaneous lichen amyloidosis and in skin amyloidosis associated with multiple endocrine neoplasia. J. Invest. Derm. 107: 215-218, 1996.
[8822] 2936. Fantes, J. A.; Bickmore, W. A.; Fletcher, J. M.; Ballesta, F.; Hanson, I. M.; van Heyningen, V.: Submicroscopic deletions at the WAGR locus, revealed by nonradioactive in situ hybridization. Am. J. Hum. Genet. 51: 1286-1294, 1992.
[8823] 2937. Glaser, T.; Jepeal, L.; Edwards, J. G.; Young, S. R.; Favor, J.; Maas, R. L.: PAX6 gene dosage effect in a family with congenital cataracts, aniridia, anophthalmia and central nervous system defects. Nature Genet. 7: 463-471, 1994.
[8824] 2938. Glaser, T.; Lane, J.; Housman, D.: A mouse model of the aniridia-Wilmstumor deletion syndrome. Science 250: 823-827, 1990.
[8825] 2939. Gronskov, K.; Olsen, J. H.; Sand, A.; Pedersen, W.; Carlsen, N.; Jylling, A. M. B.; Lyngbye, T.; Brondum-Nielsen, K.; Rosenberg, T.: Population-based risk estimates of Wilms tumor in sporadic aniridia: a comprehensive mutation screening procedure of PAX6 identifies 80% of mutations in aniridia. Hum. Genet. 109: 11-18, 2001.
[8826] 2940. Hanson, I. M.; Seawright, A.; Hardman, K.; Hodgson, S.; Zaletayev, D.; Fekete, G.; van Heyningen, V.: PAX6 mutations in aniridia. Hum. Molec. Genet. 2: 915-920, 1993.
[8827] 2941. Hill, R. E.; Favor, J.; Hogan, B. L. M.; Ton, C. C. T.; Saunders, G. F.; Hanson, I. M.; Prosser, J.; Jordan, T.; Hastie, N. D.; van Heyningen, V.: Mouse small eye results from mutations in a paired-like homeobox-containing gene. Nature 354: 522-525, 1991.
[8828] 2942. Jordan, T.; Hanson, I.; Zaletayev, D.; Hodgson, S.; Prosser, J.; Seawright, A.; Hastie, N.; van Heyningen, V.: The human PAX6 gene is mutated in two patients with aniridia. Nature Genet. 1: 328-332, 1992.
[8829] 2943. Karpen, G. H.: Position effect variegation and the new biology of heterochromatin. Curr. Opin. Genet. Dev. 4: 281-291, 1994.
[8830] 2944. Lyon, M. F.: Personal Communication. Harwell, England Jun. 9, 1988.
[8831] 2945. Martha, A.; Strong, L. C.; Ferrell, R. E.; Saunders, G. F.: Three novel aniridia mutations in the human PAX6 gene. Hum. Mutat. 6:44-49, 1995.
[8832] 2946. Matsuo, T.; Osumi-Yamashita, N.; Noji, S.; Ohuchi, H.; Koyama, E.; Myokai, F.; Matsuo, N.; Taniguchi, S.; Doi, H.; Iseki, S.; Ninomiya, Y.; Fujiwara, M.; Watanabe, T.; Eto, K.: A mutation in the Pax-6 gene in rat small eye is associated with impaired migration of midbrain crest cells. Nature Genet. 3: 299-304, 1993.
[8833] 2947. Oliver, M. D.; Dotan, S. A.; Chemke, J.; Abraham, F. A.: Isolated foveal hypoplasia. Brit. J. Ophthal. 71: 926-930, 1987.
[8834] 2948. Prosser, J.; van Heyningen, V.: PAX6 mutations reviewed. Hum. Mutat. 11: 93-108, 1998.
[8835] 2949. Quiring, R.; Walldorf, U.; Kloter, U.; Gehring, W. J.: Homology of the eyeless gene of Drosophila to the small eye gene in mice and aniridia in humans. Science 265: 785-789, 1994.
[8836] 2950. Salvini-Plawen, L.; Mayr, E.: On the evolution of photoreceptors and eyes. In: Hecht, M. K.; Steere, W.; Wallace, B.: Evolutionary Biology. New York: Plenum Pub. (pub.) 10: 1977. Pp. 207-263.
[8837] 2951. Schedl, A.; Ross, A.; Lee, M.; Engelkamp, D.; Rashbass, P.; van Heyningen, V.; Hastie, N. D.: Influence of PAX6 gene dosage on development: overexpression causes severe eye abnormalities. Cell 86: 71-82, 1996.
[8838] 2952. Stone, D. L.; Kenyon, K. R.; Green, W. R.; Ryan, S. J.: Congenital central corneal leukoma (Peters' anomaly). Am. J. Ophthal. 81: 173-193, 1976.
[8839] 2953. van der Meer-deJong, R.; Dickinson, M. E.; Woychik, R. P.; Stubbs, L.; Hetherington, C.; Hogan, B. L. M.: Location of the gene involving the small eye mutation on mouse chromosome 2 suggests homology with human aniridia 2 (AN2). Genomics 7: 270-275, 1990.
[8840] 2954. Cowan, C. A.; Yokoyama, N.; Bianchi, L. M.; Henkemeyer, M.; Fritzsch, B.: EphB2 guides axons at the midline and is necessary for normal vestibular function. Neuron 26: 417-430, 2000.
[8841] 2955. Ton, C. C. T.; Hirvonen, H.; Miwa, H.; Weil, M. M.; Monaghan, P.; Jordan, T.; van Heyningen, V.; Hastie, N. D.; Meijers-Heijboer, H.; Drechsler, M.; Royer-Pokora, B.; Collins, F.; Swaroop, A.; Strong, L. C.; Saunders, G. F.: Positional cloning and characterization of a paired box- and homeobox-containing gene from the aniridia region. Cell 67:1059-1074, 1991.
[8842] 2956. Schmickel, R. D.: Contiguous gene syndromes: a component of recognizable syndromes. J. Pediat. 109: 231-241, 1986.
[8843] 2957. Valent, A.; Danglot, G.; Bernheim, A.: Mapping of the tyrosine kinase receptors trkA (NTRK1), trkB (NTRK2) and trkC (NTRK3) to human chromosomes 1q22, 9q22 and 15q25 by fluorescence in situ hybridization. Europ. J. Hum. Genet. 5: 102-104, 1997.
[8844] 2958. Day, I. N. M.; Hinks, L. J.; Thompson, R. J.: The structure of the gene encoding protein gene product 9.5 (PGP9.5), a neuron-specific ubiquitin C-terminal hydrolase. Biochem. J. 268: 521-524, 1990.
[8845] 2959. Day, I. N. M.; Thompson, R. J.: Molecular cloning of cDNA coding for human PGP 9.5 protein: a novel cytoplasmic marker for neurones and neuroendocrine cells. FEBS Lett. 210: 157-160, 1987.
[8846] 2960. Doran, J. F.; Jackson, P.; Kynoch, P.; Thompson, R. J.: Isolation of PGP 9.5, a new human neurone-specific protein detected by high-resolution two-dimensional electrophoresis. J. Neurochem. 40: 1542-1547, 1983.
[8847] 2961. Edwards, Y. H.; Fox, M. F.; Povey, S.; Hinks, L. J.; Day, I. N. M.; Thompson, R. J.: The gene for human neuron specific ubiquitin C-terminal hydrolase maps to chromosome 4p14. (Abstract) Cytogenet. Cell Genet. 58: 1886-1887, 1991.
[8848] 2962. Kurihara, L. J.; Kikuchi, T.; Wada, K.; Tilghman, S. M.: Loss of Uch-L1 and Uch-L3 leads to neurodegeneration, posterior paralysis and dysphagia. Hum. Molec. Genet. 10: 1963-1970, 2001.
[8849] 2963. Kurihara, L. J.; Semenova, E.; Levorse, J. M.; Tilghman, S. M.: Expression and functional analysis of Uch-L3 during mouse development. Molec. Cell. Biol. 20: 2498-2504, 2000.
[8850] 2964. Leroy, E.; Boyer, R.; Auburger, G.; Leube, B.; Ulm, G.; Mezey, E.; Harta, G.; Brownstein, M. J.; Jonnalagada, S.; Chernova, T.; Dehejia, A.; Lavedan, C.; Gasser, T.; Steinbach, P. J.; Wilkinson, K. D.; Polymeropoulos, M. H.: The ubiquitin pathway in Parkinson's disease. (Letter) Nature 395:451-452, 1998.
[8851] 2965. Lincoln, S.; Vaughan, J.; Wood, N.; Baker, M.; Adamson, J.; Gwinn-Hardy, K.; Lynch, T.; Hardy, J.; Farrer, M.: Low frequency of pathogenic mutations in the ubiquitin carboxy-terminal hydrolase gene in familial Parkinson's disease. Neuroreport 10: 427-429, 1999.
[8852] 2966. MacDonald, M. E.: Gadzooks! Nature Genet. 23: 10-11, 1999.
[8853] 2967. Saigoh, K.; Wang, Y.-L.; Suh, J.-G.; Yamanishi, T.; Sakai, Y.; Kiyosawa, H.; Harada, T.; Ichihara, N.; Wakana, S.; Kikuchi, T.; Wada, K.: Intragenic deletion in the gene encoding ubiquitin carboxy-terminal hydrolase in gad mice. Nature Genet. 23: 47-51, 1999.
[8854] 2968. Suh, J. G.; Yamanishi, T.; Matsui, K.; Tanaka, K.; Wada, K.: Mapping of the gracile axonal dystrophy (gad) gene to a region between D5Mit197 and D5Mit113 on proximal mouse chromosome 5. Genomics 27:549-551, 1995.
[8855] 2969. Wilkinson, K. D.; Lee, K. M.; Deshpande, S.; Duerksen-Hughes, P.; Boss, J. M.; Pohl, J.: The neuron-specific protein PGP 9.5 is a ubiquitin carboxyl-terminal hydrolase. Science 246: 670-672, 1989.
[8856] 2970. Yamazaki, K.; Wakasugi, N.; Tomita, T.; Kikuchi, T.; Mukoyama, M.; Ando, K.: Gracile axonal dystrophy (GAD), a new neurological mutant in the mouse. Proc. Soc. Exp. Biol. Med. 187: 209-215, 1988.
[8857] 2971. Morii, K.; Tanaka, R.; Takahashi, Y.; Minoshima, S.; Fukuyama, R.; Shimizu, N.; Kuwano, R.: Structure and chromosome assignment of human S100 alpha and beta subunit genes. Biochem. Biophys. Res. Commun. 175: 185-191, 1991.
[8858] 2972. Ip, N. Y.; Stitt, T. N.; Tapley, P.; Klein, R.; Glass, D. J.; Fandl, J.; Greene, L. A.; Barbacid, M.; Yancopoulos, G. D.: Similarities and differences in the way neurotrophins interact with the Trk receptors in neuronal and nonneuronal cells. Neuron 10: 137-149, 1993.
[8859] 2973. Bonnefont, J.-P.; Chretien, D.; Rustin, P.; Robinson, B.; Vassault, A.; Aupetit, J.; Charpentier, C.; Rabier, D.; Saudubray, J.-M.; Munnich, A.: Alpha-ketoglutarate dehydrogenase deficiency presenting as congenitallactic acidosis. J. Pediat. 121: 255-258, 1992.
[8860] 2974. Guffon, N.; Lopez-Mediavilla, C.; Dumoulin, R.; Mousson, B.; Godinot, C.; Carrier, H.; Collombet, J. M.; Divry, P.; Mathieu, M.; Guibaud, P.: 2-Ketoglutarate dehydrogenase deficiency, a rare cause of primaryhyperlactataemia: report of a new case. J. Inherit. Metab. Dis. 16:821-830, 1993.
[8861] 2975. Kohlschutter, A.; Behbehani, A.; Langenbeck, U.; Albani, M.; Heidemann, P.; Hoffmann, G.; Kleineke, J.; Lehnert, W.; Wendel, U.: A familial progressive neurodegenerative disease with 2-oxoglutaric acid uria. Europ. J. Pediat. 138: 32-37, 1982.
[8862] 2976. Koike, K.: The gene encoding human 2-oxoglutarate dehydrogenase: structural organization and mapping to chromosome 7p13-p14. Gene 159:261-266, 1995.
[8863] 2977. Koike, K.; Urata, Y.; Goto, S.: Cloning and nucleotide sequence of the cDNA encoding human 2-oxoglutarate dehydrogenase (lipoamide). Proc. Nat. Acad. Sci. 89: 1963-1967, 1992.
[8864] 2978. Szabo, P.; Cai, X.; Ali, G.; Blass, J. P.: Localization of the gene (OGDH) coding for the Elk component of the alpha-ketoglutarate dehydrogenase complex to chromosome 7p13-p11.2. Genomics 20: 324-326, 1994.
[8865] 2979. Ono, H.; Kuno, Y.; Tanaka, H.; Yamashina, M.; Tsuyoshi, T.; Kondo, N.; Orii, T.: A case of paroxysmal nocturnal hemoglobinuria without deficiency of decay-accelerating factor on erythrocytes. Blood 75:1746-1747, 1990.
[8866] 2980. Petranka, J. G.; Fleenor, D. E.; Sykes, K.; Kaufman, R. E.; Rosse, W. F.: Structure of the CD59-encoding gene: further evidence of a relationship to murine lymphocyte antigen Ly-6 protein. Proc. Nat. Acad. Sci. 89: 7876-7879, 1992.
[8867] 2981. Rosse, W. F.: Personal Communication. Durham, N.C. Jun. 3, 1993.
[8868] 2982. Rosse, W. F.; Parker, C. J.: Paroxysmal nocturnal hemoglobinuria. Clin. Haemat. 14: 105-125, 1985.
[8869] 2983. Rother, R. P.; Rollins, S. A.; Mennone, J.; Chodera, A.; Fidel, S. A.; Bessler, M.; Hillmen, P.; Squinto, S. P.: Expression of recombinant transmembrane CD59 in paroxysmal nocturnal hemoglobinuria B cells confers resistance to human complement. Blood 84: 2604-2611, 1994.
[8870] 2984. Tone, M.; Walsh, L. A.; Waldmann, H.: Gene structure of human CD59 and demonstration that discrete mRNAs are generated by alternative polyadenylation. J. Molec. Biol. 227: 971-976, 1992.
[8871] 2985. Walsh, L. A.; Tone, M.; Thiru, S.; Waldmann, H.: The CD59 antigen—a multifunctional molecule. Tissue Antigens 40: 213-220, 1992.
[8872] 2986. Yamashina, M.; Ueda, E.; Kinoshita, T.; Takami, T.; Ojima, A.; Ono, H.; Tanaka, H.; Kondo, N.; Orii, T.; Okada, N.; Okada, H.; Inoue, K.; Kitani, T.: Inherited complete deficiency of 20-kilodalton homologous restriction factor (CD59) as a cause of paroxysmal nocturnal hemoglobinuria. New Eng. J. Med. 323: 1184-1189, 1990.
[8873] 2987. Loughney, K.; Martins, T. J.; Harris, E. A. S.; Sadhu, K.; Hicks, J. B.; Sonnenburg, W. K.; Beavo, J. A.; Ferguson, K.: Isolation and characterization of cDNAs corresponding to two human calcium, calmodulin-regulated, 3-prime, 5-prime-cyclic nucleotide phosphodiesterases. J. Biol. Chem. 271:796-806, 1996.
[8874] 2988. Wilson, D. E.; McKenna, L.: Assignment of the human gene for phosphodiesterase 1A to chromosome 4. (Abstract) Am. J. Hum. Genet. 43: A162 only, 1988.
[8875] 2989. Gallango, M. L.; Muller, A.; Suinaga, R.: Biochemical characterization of a red cell UMP kinase variant found in the Warao Indians of Venezuela. Biochem. Genet. 16: 1085-1093, 1978.
[8876] 2990. Gallango, M. L.; Suinaga, R.: Uridine monophosphate kinase polymorphismin two Venezuelan populations. Am. J. Hum. Genet. 30: 215-218, 1978.
[8877] 2991. Giblett, E. R.; Anderson, J. E.; Chen, S.-H.; Teng, Y.-S.; Cohen, F.: Uridine monophosphate kinase: a new genetic polymorphism with possible clinical implications. Am. J. Hum. Genet. 26: 627-635, 1974.
[8878] 2992. Giblett, E. R.; Anderson, J. E.; Lewis, M.; Kaita, H.: A new polymorphic enzyme, uridine monophosphate kinase: gene frequencies and a linkage analysis. Birth Defects Orig. Art. Ser. 11(3): 159-161, 1975. Note: Alternate: Cytogenet. Cell Genet. 14: 329-331, 1975.
[8879] 2993. Medrano, L.; Green, H.: A uridine kinase deficient mutant of 3T3 and a selective method for cells containing the enzyme. Cell 1:23-26, 1974.
[8880] 2994. Petersen, G. M.; Silimperi, D. R.; Scott, E. M.; Hall, D. B.; Rotter, J. I.; Ward, J. I.: Uridine monophosphate kinase 3: a genetic marker for susceptibility to Haemophilus influenzae type B disease. Lancet II:417-418, 1985.
[8881] 2995. Ranzani, G.; Bertolotti, E.; Santachiara-Benerecetti, A. S.: The polymorphism of the red cell uridine monophosphate kinase in two samples of the Italian population. Hum. Hered. 27: 332-335, 1977.
[8882] 2996. Ruddle, F. H.; Creagan, R. P.: Parasexual approaches to the genetics of man. Ann. Rev. Genet. 9: 407-486, 1975.
[8883] 2997. Satlin, A.; Kucherlapati, R. S.; Ruddle, F. H.: Assignment of the gene for human uridine monophosphate kinase to chromosome 1 using somatic cell hybrid clone panels. Cytogenet. Cell Genet. 15: 146-152, 1975.
[8884] 2998. Xiong, J.-P.; Stehle, T.; Diefenbach, B.; Zhang, R.; Dunker, R.; Scott, D. L.; Joachimiak, A.; Goodman, S. L.; Arnaout, M. A.: Crystal structure of the extracellular segment of integrin alpha-V-beta-3. Science 294:339-345, 2001.
[8885] 2999. Xiong, J.-P.; Stehle, T.; Zhang, R.; Joachimiak, A.; Frech, M.; Goodman, S. L.; Arnaout, M. A.: Crystal structure of the extracellular segment of integrin alpha-V-beta-3 in complex with an Arg-Gly-Aspligand. Science 296: 151-155, 2002.
[8886] 3000. Disteche, C. M.; Plowman, G. D.; Gronwald, R. G. K.; Kelly, J.; Bowen-Pope, D.; Adler, D. A.; Murray, J. C.: Mapping of the amphiregulin and the platelet-growth factor receptor alpha genes to the proximal long arm of chromosome 4. (Abstract) Cytogenet. Cell Genet. 51:990, 1989.
[8887] 3001. Gronwald, R. G. K.; Adler, D. A.; Kelly, J. D.; Disteche, C. M.; Bowen-Pope, D. F.: The human PDGF receptor alpha-subunit gene maps to chromosome 4 in close proximity to c-kit. Hum. Genet. 85: 383-385, 1990.
[8888] 3002. Hol, F. A.; Geurds, M. P. A.; Chatkupt, S.; Shugart, Y. Y.; Balling, R.; Schrander-Stumpel, C. T. R. M.; Johnson, W. G.; Hamel, B. C. J.; Mariman, E. C. M.: PAX genes and human neural tube defects: an amino acid substitution in PAX1 in a patient with spina bifida. J. Med. Genet. 8: 655-660, 1996.
[8889] 3003. Hsieh, C.-L.; Navankasattusas, S.; Escobedo, J. A.; Williams, L. T.; Francke, U.: Chromosomal localization of the gene for AA-type platelet-derived growth factor receptor (PDGFRA) in humans and mice. Cytogenet. Cell Genet. 56: 160-163, 1991.
[8890] 3004. Ikuno, Y.; Kazlauskas, A.: TGF-beta-1-dependent contraction of fibroblasts is mediated by th PDGF-alpha receptor. Invest. Ophthal. Vis. Sci. 43: 41-46, 2002.
[8891] 3005. Joosten, P. H. L. J.; Hol, F. A.; van Beersum, S. E. C.; Peters, H.; Hamel, B. C. J.; Afink, G. B.; van Zoelen, E. J. J.; Mariman, E. C. M.: Altered regulation of platelet-derived growth factor receptor-alpha gene-transcription in vitro by spina bifida-associated mutant Paxl proteins. Proc. Nat. Acad. Sci. 95: 14459-14463, 1998.
[8892] 3006. Lin, F.; Worman, H. J.: Structural organization of the human gene (LMNB1) encoding nuclear lamin B1. Genomics 27: 230-236, 1995.
[8893] 3007. Maeno, H.; Sugimoto, K.; Nakajima, N.: Genomic structure of the mouse gene (Lmnbl) encoding nuclear lamin B1. Genomics 30: 342-346, 1995.
[8894] 3008. Kanzaki, T.; Olofsson, A.; Moren, A.; Wernstedt, C.; Hellman, U.; Miyazono, K.; Claesson-Welsh, L.; Heldin, C. H.: TGF-beta 1 binding protein: a component of the large latent complex of TGF-beta 1 with multiple repeat sequences. Cell 61: 1051-1061, 1990.
[8895] 3009. Oklu, R.; Hesketh, R.: The latent transforming growth factor beta binding protein (LTBP) family. Biochem. J. 352: 601-610, 2000.
[8896] 3010. Stenman, G.; Sahlin, P.; Olofsson, A.; Geurts van Kessel, A.; Miyazono, K.: Assignment of the gene encoding the latent TGF-beta-1-binding protein (LTBP1) to human chromosome 2, region p12-q22. Cytogenet. Cell Genet. 66: 117-119, 1994.
[8897] 3011. Wydner, K. L.; McNeil, J. A.; Lin, F.; Worman, H. J.; Lawrence, J. B.: Chromosomal assignment of human nuclear envelope protein genes LMNA, LMNB1, and LBR by fluorescence in situ hybridization. Genomics 32:474-478, 1996.
[8898] 3012. Furukawa, K.; Hotta, Y.: cDNA cloning of a germ cell specific lamin B3 from mouse spermatocytes and analysis of its function by ectopic expression in somatic cells. EMBO J. 12: 97-106, 1993.
[8899] 3013. Furukawa, K.; Inagaki, H.; Hotta, Y.: Identification and cloning of an mRNA coding for a germ cell-specific A-type lamin in mice. Exp. Cell Res. 212: 426-430, 1994.
[8900] 3014. Cohen, A. J.; Li, F. P.; Berg, S.; Marchetto, D. J.; Tsai, S.; Jacobs, S. C.; Brown, R. S.: Hereditary renal-cell carcinoma associated with chromosomal translocation. New Eng. J. Med. 301: 592-595, 1979.
[8901] 3015. Gemmill, R. M.; West, J. D.; Boldog, F.; Tanaka, N.; Robinson, L. J.; Smith, D. I.; Li, F.; Drabkin, H. A.: The hereditary renal cell carcinoma 3;8 translocation fuses FHIT to a patched-related gene, TRC8. Proc. Nat. Acad. Sci. 95: 9572-9577, 1998.
[8902] 3016. Krissansen, G. W.; Yuan, Q.; Jenkins, D.; Jiang, W.-M.; Rooke, L.; Spurr, N. K.; Eccles, M.; Leung, E.; Watson, J. D.: Chromosomal locations of the genes coding for the integrin beta-6 and beta-7 subunits. Immunogenetics 35: 58-61, 1992.
[8903] 3017. Baker, E.; Sutherland, G. R.; Jiang, W.-M.; Yuan, Q.; Leung, E.; Watson, J. D.; Krissansen, G. W.: Mapping of the human integrin beta-7 gene (ITG-beta-7) to 12q13.13 by non-isotopic in situ hybridization. Mammalian Genome 2: 272-273, 1992.
[8904] 3018. Erle, D. J.; Ruegg, C.; Sheppard, D.; Pytela, R.: Complete amino acid sequence of an integrin beta subunit (beta-7) identified in leukocytes. J. Biol. Chem. 266: 11009-11016, 1991.
[8905] 3019. Yuan, Q.; Kozak, C. A.; Jiang, W.; Hollander, D.; Watson, J. D.; Krissansen, G. W.: Genetic mapping of the gene coding for the integrin beta-7 subunit to the distal part of mouse chromosome 15. Immunogenetics 35:403-407, 1992.
[8906] 3020. Siegelmann-Danieli, N.; Buetow, K. H.: Constitutional genetic variation at the human aromatase gene (Cyp19) and breast cancer risk. Brit. J. Cancer 79: 456-463, 1999.
[8907] 3021. Simpson, E. R.; Michael, M. D.; Agarwal, V. R.; Hinshelwood, M. M.; Bulun, S. E.; Zhao, Y.: Expression of the CYP19 (aromatase) gene: an unusual case of alternative promoter usage. FASEB J. 11: 29-36, 1997.
[8908] 3022. Sparkes, R. S.; Mohandas, T.; Chen, S.; Besman, M. J.; Zollman, S.; Shively, J. E.: Assignment of the aromatase gene to human chromosome 15q21. (Abstract) Cytogenet. Cell Genet. 46: 696-697, 1987.
[8909] 3023. Toda, K.; Merashima, M.; Kawamoto, T.; Sumimoto, H.; Yokoyama, Y.; Kuribayashi, I.; Mitsuuchi, Y.; Maeda, T.; Yamamoto, Y.; Sagara, Y.; Ikeda, H.; Shizuta, Y.: Structural and functional characterization of human aromatase P-450 gene. Europ. J. Biochem. 193: 559-565, 1990.
[8910] 3024. Wang, Z. J.; Jeffs, B.; Ito, M.; Achermann, J. C.; Yu, R. N.; Hales, D. B.; Jameson, J. L.: Aromatase (Cyp19) expression is up-regulated by targeted disruption of Dax1. Proc. Nat. Acad. Sci. 98: 7988-7993, 2001.
[8911] 3025. Whitlock, J. P., Jr.: The regulation of cytochrome P-450 gene expression. Annu. Rev. Pharm. Toxicol. 26: 333-369, 1986.
[8912] 3026. Zhou, D.; Pompon, D.; Chen, S.: Structure-function studies of human aromatase by site-directed mutagenesis: kinetic properties of mutants pro308-to-phe, tyr361-to-phe, tyr361-to-leu, and phe406-to-arg. Proc. Nat. Acad. Sci. 88: 410-414, 1991.
[8913] 3027. McDonald, P. H.; Chow, C.-W.; Miller, W. E.; Laporte, S. A.; Field, M. E.; Lin, F.-T.; Davis, R. J.; Lefkowitz, R. J.: Beta-arrestin2: a receptor-regulated MAPK scaffold for the activation of JNK3. Science 290:1574-1577, 2000.
[8914] 3028. Masi, L.; Becherini, L.; Colli, E.; Gennari, L.; Mansani, R.; Falchetti, A.; Becorpi, A. M.; Cepollaro, C.; Gonnelli, S.; Tanini, A.; Brandi, M. L.: Polymorphisms of the calcitonin receptor gene are associated with bone mineral density in postmenopausal Italian women. Biochem. Biophys. Res. Commun. 248: 190-195, 1998.
[8915] 3029. Masi, L.; Becherini, L.; Gennari, L.; Colli, E.; Mansani, R.; Falchetti, A.; Cepollaro, C.; Gonnelli, S.; Tanini, A.; Brandi, M. L.: Allelic variants of human calcitonin receptor: distribution and association with bone mass in postmenopausal Italian women. Biochem. Biophys. Res. Commun. 245: 622-626, 1998.
[8916] 3030. Nakamura, M.; Zhang, Z. Q.; Shan, L.; Hisa, T.; Sasaki, M.; Tsukino, R.; Yokoi, T.; Kaname, A.; Kakudo, K.: Allelic variants of human calcitonin receptor in the Japanese population. Hum. Genet. 99:38-41, 1997.
[8917] 3031. Perezjurado, L. A.; Li, X.; Francke, U.: The human calciton inreceptor gene (CALCR) at 7q21.3 is outside the deletion associated with the Williams syndrome. Cytogenet. Cell Genet. 70: 246-249, 1995.
[8918] 3032. Taboulet, J.; Frendo, J. L.; Delage-Murroux, R.; Pichaud, F.; deVernejoul, M. C.; Jullienne, A.: Evidence for 2 allelic forms of calcitonin receptor gene: distribution in normal and osteoporotic women. (Abstract) J. Bone Miner. Res. 11 (suppl. 1): S204, 1996.
[8919] 3033. Taboulet, J.; Frenkian, M.; Frendo, J. L.; Feingold, N.; Jullienne, A.; de Vernejoul, M. C.: Calcitonin receptor polymorphism is associated with a decreased fracture risk in post-menopausal women. Hum. Molec. Genet. 7: 2129-2133, 1998.
[8920] 3034. Doray, B.; Ghosh, P.; Griffith, J.; Geuze, H. J.; Kornfeld, S.: Cooperation of GGAs and AP-1 in packaging MPRs at the trans-Golgi network. Science 297: 1700-1703, 2002.
[8921] 3035. Li, X.-Y.; Mattei, M. G.; Zaleska-Rutczynska, Z.; Hooft van Huijsduijnen, R.; Figueroa, F.; Nadeau, J.; Benoist, C.; Mathis, D.: One subunit of the transcription factor NF-Y maps close to the major histocompatibility-complex in murine and human chromosomes. Genomics 11: 630-634, 1991.
[8922] 3036. Aasland, R.; Olsen, L. C.; Spurr, N. K.; Krokan, H. E.; Helland, D. E.: Chromosomal assignment of human uracil*DNA glycosylase to chromosome 12. Genomics 7: 139-141, 1990.
[8923] 3037. Dinner, A. R.; Blackburn, G. M.; Karplus, M.: Uracil-DNA glycolase acts by substrate autocatalysis. Nature 413: 752-755, 2001.
[8924] 3038. Haug, T.; Skorpen, F.; Kvaloy, K.; Eftedal, I.; Lund, H.; Krokan, H. E.: Human uracil-DNA glycosylase gene: sequence organization, methylation pattern, and mapping to chromosome 12q23-q24.1. Genomics 36:408-416, 1996.
[8925] 3039. Haug, T.; Skorpen, F.; Lund, H.; Krokan, H. E.: Structure of the gene for human uracil-DNA glycosylase and analysis of the promoter function. FEBS Lett. 353: 180-184, 1994.
[8926] 3040. Meyer-Siegler, K.; Mauro, D. J.; Seal, G.; Wurzer, J.; deRiel, J. K.; Sirover, M. A.: A human nuclear uracil DNA glycosylase is the 37-kDa subunit of glyceraldehyde-3-phosphate dehydrogenase. Proc. Nat. Acad. Sci. 88: 8460-8464, 1991.
[8927] 3041. Nilsen, H.; Rosewell, I.; Robins, P.; Skjelbred, C. F.; Andersen, S.; Slupphaug, G.; Daly, G.; Krokan, H. E.; Lindahl, T.; Barnes, D. E.: Uracil-DNA glycosylase (UNG)-deficient mice reveal a primary role of the enzyme during DNA replication. Molec. Cell 5: 1059-1065, 2000.
[8928] 3042. Olsen, L. C.; Aasland, R.; Wittwer, C. U.; Krokan, H. E.; Helland, D. E.: Molecular cloning of human uracil-DNA glycosylase, a highly conserved DNA repair enzyme. EMBO J. 8: 3121-3125, 1989.
[8929] 3043. Vollberg, T. M.; Siegler, K. M.; Cool, B. L.; Sirover, M. A.: Isolation and characterization of the human uracil DNA glycosylase gene. Proc. Nat. Acad. Sci. 86: 8693-8697, 1989.
[8930] 3044. Momeni, P.; Glockner, G.; Schmidt, O.; von Holtum, D.; Albrecht, B.; Gillessen-Kaesbach, G.; Hennekam, R.; Meinecke, P.; Zabel, B.; Rosenthal, A.; Horsthemke, B.; Ludecke, H.-J.: Mutations in a new gene, encoding a zincfinger protein, cause tricho-rhino-phalangeal syndrome type I. Nature Genet. 24: 71-74, 2000.
[8931] 3045. He, Z.; Yamamoto, R.; Furth, E. E.; Schantz, L. J.; Naylor, S. L.; George, H.; Biliheimer, J. T.; Strauss, J. F., III: cDNAs encoding members of a family of proteins related to human sterol carrier protein 2 and assignment of the gene to human chromosome 1p21-pter. DNA Cell Biol. 10: 559-569, 1991.
[8932] 3046. Vesa, J.; Hellsten, E.; Barnoski, B. L.; Emanuel, B. S.; Billheimer, J. T.; Mead, S.; Cowell, J. K.; Strauss, J. F., III; Peltonen, L.: Assignment of sterol carrier protein X/sterol carrier protein 2 to 1p32 and its exclusion as the causative gene for infantile neuronalceroid lipofuscinosis. Hum. Molec. Genet. 3: 341-346, 1994.
[8933] 3047. Welch, C. L.; Xia, Y.-R.; Billheimer, J. T.; Strauss, J. F., III; Lusis, A. J.: Assignment of the mouse sterol carrier protein gene (Scp2) to chromosome 4. Mammalian Genome 7: 624-625, 1996.
[8934] 3048. Yamamoto, R.; Kallen, C. B.; Babalola, G. O.; Rennert, H.; Billheimer, J. T.; Strauss, J. F., III: Cloning and expression of a cDNA encoding human sterol carrier protein 2. Proc. Nat. Acad. Sci. 88: 463-467, 1991.
[8935] 3049. Yamamoto, R.; Naylor, S. L.; George, H.; Billheimer, J. T.; Strauss, J. F., III: Assignment of the gene encoding sterol carrier protein 2 to human chromosome 1pter-p21. (Abstract) Cytogenet. Cell Genet. 58:1866-1867, 1991.
[8936] 3050. To be, K.; Suzuki, R.; Aoyama, M.; Yamauchi, T.; Kamon, J.; Kubota, N.; Terauchi, Y.; Matsui, J.; Akanuma, Y.; Kimura, S.; Tanaka, J.; Abe, M.; Ohsumi, J.; Nagai, R.; Kadowaki, T.: Increased expression of the sterol regulatory element-binding protein-1 gene in insulin receptor substrate-2−/− mouse liver. J. Biol. Chem. 276: 38337-38340, 2001.
[8937] 3051. Joosten, P. H. L. J.; Toepoel, M.; Mariman, E. C. M.; Van Zoelen, E. J. J.: Promoter haplotype combinations of the platelet-derived growth factor alpha-receptor gene predispose to human neural tube defects. Nature Genet. 27: 215-217, 2001.
[8938] 3052. Fox, G. M.; Holst, P. L.; Chute, H. T.; Lindberg, R. A.; Janssen, A. M.; Basu, R.; Welcher, A. A.: cDNA cloning and tissue distribution of five human EPH-like receptor protein-tyrosine kinases. Oncogene 10:897-905, 1995.
[8939] 3053. Ludecke, H.-J.; Schaper, J.; Meinecke, P.; Momeni, P.; Gross, S.; von Holtum, D.; Hirche, H.; Abramowicz, M. J.; Albrecht, B.; Apacik, C.; Christen, H.-J.; Claussen, U.; and 28 others: Genotypic and phenotypic spectrum in trichorhino-phalangeal syndrome types I and III. Am. J. Hum. Genet. 68: 81-91, 2001.
[8940] 3054. Chan, J.; Watt, V. M.: Eek and erk, new members of the eph subclass of receptor protein-tyrosine kinases. Oncogene 6: 1057-1061, 1991.
[8941] 3055. Colucci, F.; Schweighoffer, E.; Tomasello, E.; Turner, M.; Ortaldo, J. R.; Vivier, E.; Tybulewicz, V. L. J.; Di Santo, J. P.: Natural cytotoxicity uncoupled from the Syk and ZAP-70 intracellular kinases. Nature Immun. 3: 288-294, 2002.
[8942] 3056. Levine, A.; Cantoni, G. L.; Razin, A.: Inhibition of promoter activity by methylation: possible involvement of protein mediators. Proc. Nat. Acad. Sci. 88: 6515-6518, 1991.
[8943] 3057. Nan, X.; Meehan, R. R.; Bird, A.: Dissection of the methyl-CpG binding domain from the chromosomal protein MeCP2. Nucleic Acids Res. 21: 4886-4892, 1993.
[8944] 3058. Ohki, I.; Shimotake, N.; Fujita, N.; Jee, J.-G.; Ikegami, T.; Nakao, M.; Shirakawa, M.: Solution structure of the methyl-CpG binding domain of human MBD1 in complex with methylated DNA. Cell 105: 487-497, 2001.
[8945] 3059. Romashkova, J. A.; Makarov, S. S.: NF-kappa-B is a target of AKT in anti-apoptotic PDGF signalling. Nature 401: 86-90, 1999.
[8946] 3060. Sanyal, S.; Sandstrom, D. J.; Hoeffer, C. A.; Ramaswami, M.: AP-1 function upstream of CREB to control synaptic plasticity in Drosophila. Nature 416:870-874, 2002.
[8947] 3061. Takahashi, E.; Hori, T.; O'Connell, P.; Leppert, M.; White, R.: R-banding and nonisotopic in situ hybridization: precise localization of the human type II collagen gene (COL2A1). Hum. Genet. 86: 14-16, 1990.
[8948] 3062. Takahashi, E.; Yamauchi, M.; Tsuji, H.; Hitomi, A.; Meuth, M.; Hori, T.: Chromosome mapping of the human cytidine-5-prime-triphosphate synthetase (CTPS) gene to band 1p34.1-p34.3 by fluorescence in situ hybridization. Hum. Genet. 88: 119-121, 1991.
[8949] 3063. Takahashi, E.-I.; Yamauchi, M.; Ayusawa, D.; Kaneda, S.; Seno, T.; Meuth, M.; Hori, T.-A.: Chromosome mappings of the human cytidine-5-prime-triphosphate synthetase (CTPS) gene and the human ubiquitin-activating enzyme UBE1 gene by fluorescence in situ hybridization. (Abstract) Cytogenet. Cell Genet. 58: 1864 only, 1991.
[8950] 3064. Thomas, P. E.; Sen, S.; Lamb, B. J.; Chu, E. H. Y.: Cloning and expression of mammalian CTP synthetase genes. (Abstract) Am. J. Hum. Genet. 45 (suppl.): All only, 1989.
[8951] 3065. Whelan, J.; Phear, G.; Yamauchi, M.; Meuth, M.: Clustered base substitutions in CTP synthetase conferring drug resistance in Chinese hamster ovary cells. Nature Genet. 3: 317-322, 1993.
[8952] 3066. Yamauchi, M.; Takahashi, E.; Whelan, J.; Phear, G.; Meuth, M.: Mapping and functional analysis of the cytidine triphosphate synthetase (CTPS) gene. (Abstract) Human Genome Mapping Workshop 93 1 only, 1993.

The application's sequence listing, which the Patent Office published only in electronic form, follows.

SEQUENCE LISTING (3750 sequences)

SEQ ID NO: 1 - DNA, 123 bp, Vaccinia virus
acctctttctgatggagtcgtaaaaaagttttatctctttctctcttcgatggtctcacaaaaatattaaacctctttctgatggagtcgtaaaaaagttttatctctttctccttcgatggt

SEQ ID NO: 2 - DNA, 124 bp, Vaccinia virus
acctctttctgatggagtcgtaaaaaagttttatctctttctctcttcgatggtctcacaaaaatattaaacctctttctgatggagtcgtaaaaaagttttatctctttctctcttcgatggt

SEQ ID NO: 3 - DNA, 124 bp, Vaccinia virus; identical to SEQ ID NO: 2

SEQ ID NO: 4 - DNA, 124 bp, Vaccinia virus; identical to SEQ ID NO: 2

SEQ ID NO: 5 - DNA, 124 bp, Vaccinia virus; identical to SEQ ID NO: 2

SEQ ID NO: 6 - DNA, 124 bp, Vaccinia virus; identical to SEQ ID NO: 2

SEQ ID NO: 7 - DNA, 124 bp, Vaccinia virus; identical to SEQ ID NO: 2

SEQ ID NO: 8 - DNA, 124 bp, Vaccinia virus; identical to SEQ ID NO: 2

SEQ ID NO: 9 - DNA, 124 bp, Vaccinia virus; identical to SEQ ID NO: 2

SEQ ID NO: 10 - DNA, 124 bp, Vaccinia virus; identical to SEQ ID NO: 2

SEQ ID NO: 11 - DNA, 124 bp, Vaccinia virus; identical to SEQ ID NO: 2

SEQ ID NO: 12 - DNA, 122 bp, Vaccinia virus
acctctttctgatggagtcgtaaaaaagttttatctttctctcttcgatggtctcacaaaaatattaaacctctttctgatggagtcgtaaaaaagttttatctctttctctcttcgatggt

SEQ ID NO: 13 - DNA, 100 bp, Vaccinia virus
gatggagtcgtaaaaaagttttatctctttctccttcgatggtctcacaaaaatattaaacctctttctgatggagtcgtaaaaaagttttatctctttc

SEQ ID NO: 14 - DNA, 100 bp, Vaccinia virus; identical to SEQ ID NO: 13

SEQ ID NO: 15 - DNA, 101 bp, Vaccinia virus
gatggagtcgtaaaaaagttttatctctttctctcttcgatggtctcacaaaaatattaaacctctttctgatggagtcgtaaaaaagttttatctctttc

SEQ ID NO: 16 - DNA, 115 bp, Vaccinia virus
gatggtctcataaaaaaagttttacaaaaatatttttattctctttctctctttgatggtctcataaaaaaagttttacaaaaatatttttattctctttctctctttgatggtc

SEQ ID NO: 17 - DNA, 96 bp, Vaccinia virus
ggagtcataaaatatttttattctctttctctcttcgatggtctcacaaaaatattaaacctctttctgatggagtcgtaaaaaagttttatctct

SEQ ID NO: 18 - DNA, 130 bp, Vaccinia virus
ttaaacctctttctgatggagtcgtaaaaaagttttatctctttctccttcgatggtctcacaaaaatattaaacctctttctgatggagtcgtaaaaaagttttatctctttctcctttctcacaaaaa

SEQ ID NO: 19 - DNA, 130 bp, Vaccinia virus; identical to SEQ ID NO: 18

SEQ ID NO: 20 - DNA, 91 bp, Vaccinia virus
tttttctttggtacaaaatttcacacaagtttttatacagacaaattcttgtccatatattttaaaacattgacttttgtactaagaaaaa

SEQ ID NO: 21 - DNA, 96 bp, Vaccinia virus
agagataaaacttttttacgactccatcagaaagaggtttaatatttttgtgagaccatcgaaggagactccatcagaaagaggtttaatattttt

SEQ ID NO: 22 - DNA, 70 bp, Vaccinia virus
ataaaaatatttttgtaaaactttttttatgagaccatcaaagagagaaagagaataaaaatatttttgt

SEQ ID NO: 23 - DNA, 70 bp, Vaccinia virus; identical to SEQ ID NO: 22

SEQ ID NO: 24 - DNA, 61 bp, Vaccinia virus
atggattttactagatcatttatataccaaaaaatattatacgatctacgttttattatat

SEQ ID NO: 25 - DNA, 128 bp, Vaccinia virus
cttttttacgactccatcagaaagaggtttaatatttttgtgagaccatcgaagagagaaagagataaaacttttttacgactccatcagaaagaggtttaatatttttgtgagaccatcgaagagag

SEQ ID NO: 26 - DNA, 128 bp, Vaccinia virus; identical to SEQ ID NO: 25

SEQ ID NO: 27 - DNA, 128 bp, Vaccinia virus; identical to SEQ ID NO: 25

SEQ ID NO: 28 - DNA, 128 bp, Vaccinia virus; identical to SEQ ID NO: 25

SEQ ID NO: 29 - DNA, 128 bp, Vaccinia virus; identical to SEQ ID NO: 25

SEQ ID NO: 30 - DNA, 128 bp, Vaccinia virus; identical to SEQ ID NO: 25

SEQ ID NO: 31 - DNA, 126 bp, Vaccinia virus
cttttttacgactccatcagaaagaggtttaatatttttgtgagaccatcgaagagagaaagataaaacttttttacgactccatcagaaagaggtttaatatttttgtgagaccatcgaagagag

SEQ ID NO: 32 - DNA, 71 bp, Vaccinia virus
gtgtgcctgaatcgttcgattaaccctactcatccaatttcagatgaatagagttatcgattcagacacac

SEQ ID NO: 33 - DNA, 75 bp, Vaccinia virus
tcagaaagaggtttaatatttttgtgagaccatcgaagagagaaagagaataaaaatattttatgactccattga

SEQ ID NO: 34 - DNA, 131 bp, Vaccinia virus
ttttatgagaccatcaaagagagaaagagaataaaaatatttttgtaaaactttttttatgagaccatcaaagagagaaagagaataaaaatatttttgtaaaactttttttatgagaccatcaaagagag

SEQ ID NO: 35 - DNA, 131 bp, Vaccinia virus
ttttatgagaccatcaaagagagaaagagaataaaaatatttttgtaaaactttttttgtgagaccatcgaagagagaaagagaataaaaatatttttgtaaaactttttttatgagaccatcaaagagag

SEQ ID NO: 36 - DNA, 91 bp, Vaccinia virus
tttttcttagtacaaaagtcaatgttttaaaatatatggacaagaatttgtctgtataaaaacttgtgtgaaattttgtaccaaagaaaaa

SEQ ID NO: 37 - DNA, 126 bp, Vaccinia virus
atgtagtaatcgttgtcgtgttcctgtttcctacttctccaatcatatagatattttctttctatcatggataatatttgtaatggttctttccgtacaacatactgtttagatgatattgcgcat

SEQ ID NO: 38 - DNA, 72 bp, Vaccinia virus
gaatgactcgtcccttaataggcagtaggctagtatcttttttacgtagtaatcgtcgtagggagagaattc

SEQ ID NO: 39 - DNA, 79 bp, Vaccinia virus
gagattgtatcagtttcgtagtcttgagtattggtattactatatagtatatagatgtcgacgctagatatacagtctc

SEQ ID NO: 40 - DNA, 79 bp, Vaccinia virus
ggcaaatcttatcattggtcggtgtttggtcttgctttgtgactttgataataacatcgattcccatatgatgtttgtt

SEQ ID NO: 41 - DNA, 102 bp, Vaccinia virus
agtatgttgtacggaaagaaccattacaaatattatccatgatagaaagaaaatatctatatgattggagaagtaggaaacaggaacacgacaacgattact

SEQ ID NO: 42 - DNA, 63 bp, Vaccinia virus
aaaatcgattccgtccaagatgataaaaacatttaccggcatcataaacacggagtttatttt

SEQ ID NO: 43 - DNA, 73 bp, Vaccinia virus
catggagatactttattactccattaaataatttatcatggagtgataatgtcctgtttcatttgtttccatg

SEQ ID NO: 44 - DNA, 73 bp, Vaccinia virus
actgtatgctcctagcggagttaatccttcgttgtttctacaaagtctctcgactccgcgagagagtaacagt

SEQ ID NO: 45 - DNA, 63 bp, Vaccinia virus
atacggaatatctacgtccatgtcattattgtcatcgggtgtattctcattcatattctctat

SEQ ID NO: 46 - DNA, 67 bp, Vaccinia virus
gcaatacttctggtctcggattaggcgtcgttacgtatatatccaccaatccgagaccattgattgc

SEQ ID NO: 47 - DNA, 98 bp, Vaccinia virus
gctttgcaaattgtatattattgacatcgaccgcgtaatatagtagagttttattctcattatcgatcatatctatatcatccatgtacttgcttagt

SEQ ID NO: 48 - DNA, 78 bp, Vaccinia virus
gtcgttctcgttcagaatctttcgcagcataagtagtatgtcgatatacttatcgttgaagactcttccagagacgat

SEQ ID NO: 49 - DNA, 60 bp, Vaccinia virus
taacaatatattattagtttatattactgaattaataatataaaattcccaatcttgtta

SEQ ID NO: 50 - DNA, 68 bp, Vaccinia virus
tctcaataagaagattaacgatttccatgtctacattatatggggttactctaaatcgcttgtttaga

SEQ ID NO: 51 - DNA, 88 bp, Vaccinia virus
tgtattcagtcagacaatgtctgacgtcggccacggtattcagggagtccttagtagcgtggcaatgacagggtctgaactgggcaca

SEQ ID NO: 52 - DNA, 88 bp, Vaccinia virus
ttgatattacttataataacgatttgtttaatttttagtttatactattaattgtaaatgatattattatttttttaagtattatcag

SEQ ID NO: 53 - DNA, 63 bp, Vaccinia virus
tttaaactttggcatatacaagtctatacttttagtagataacataccacaccattttttaaa

SEQ ID NO: 54 - DNA, 75 bp, Vaccinia virus
tttcttttcacgatgcatcttattgaatgacgttttctcataagtggacatatagatgcagaagtaatgaagaaa

SEQ ID NO: 55 - DNA, 62 bp, Vaccinia virus
tcgatgatacatgtattaaaatactttccgaataagtcttttaaatattgtattaattatga

SEQ ID NO: 56 - DNA, 86 bp, Vaccinia virus
tgataatacttaaaaaaataataatatcatttacaattaatagtataaactaaaaattaaacaaatcgttattataagtaatatca

SEQ ID NO: 57 - DNA, 64 bp, Vaccinia virus
agcagcgaacaacaacatcagatatttcatcgacatttttgatggattctgtgtttatgctgtt

SEQ ID NO: 58 - DNA, 60 bp, Vaccinia virus
taacaagattgggaattttatattattaattcagtaatataaactaataatatattgtta

SEQ ID NO: 59 - DNA, 89 bp, Vaccinia virus
tacatgctgacatctaatgcctgtataaccatgagagcatctacaatacataccgtcgatatctctagcgtggatacagtcaccgtgta

SEQ ID NO: 60 - DNA, 81 bp, Vaccinia virus
tccgtttttatcagtatgtatatctatattaacgtcgtcgttgtagtgaatagtagttattgatctattatatgaaacgga

SEQ ID NO: 61 - DNA, 100 bp, Vaccinia virus
tgctaaatatgcgatgtatctatgttatttgtatttatctaaacaatacctctacctctagatattatacaaaaattttttatttcagcatattaaagta

SEQ ID NO: 62 - DNA, 85 bp, Vaccinia virus
ttttgattacgatgttataagaatgtagttaattgatgtatgatgttaatgtgtcctctttcctcttataacatcgtaatcaaaa

SEQ ID NO: 63 - DNA, 63 bp, Vaccinia virus
gattttgtgatttttcttcctaaactgtttacgtaaatagttagatagaatattcattagttc

SEQ ID NO: 64 - DNA, 81 bp, Vaccinia virus
gcgtcaaatatttcccgtttaatatcgcatttgtcaagataataatagagtgtggtatgttcacgataagtataataacgc

SEQ ID NO: 65 - DNA, 65 bp, Vaccinia virus
tatcttttaagaattgtggatattaggatattattacgtaaactattacacaattctaaaatata

SEQ ID NO: 66 - DNA, 60 bp, Vaccinia virus
atttagactgatgtatgggtaatagtgtttgaagagctcgttctcatcatcagaataaat

SEQ ID NO: 67 - DNA, 63 bp, Vaccinia virus
agccgctgagtggtaaacaacagaacagatagtttattatctttaccaacaccctcagccgct

SEQ ID NO: 68 - DNA, 82 bp, Vaccinia virus
gactagatccgttagtttaatatcctcagtcatcttgtctagaatggcaaatctaactgcgggtttaggctttagtttagtt

SEQ ID NO: 69 - DNA, 78 bp, Vaccinia virus
ggatgtaaaatgttgatgatatctacatcgtttggatttttatgtatccactttaataatatcatagctgtaacatcc

SEQ ID NO: 70 - DNA, 60 bp, Vaccinia virus
gtccgtatccagtcaacactatgttagcatttctgtcgatatagctttcactcatatgac

SEQ ID NO: 71 - DNA, 126 bp, Vaccinia virus
tagctttcatagttagatacatggtctcagaagtaggattatgtaacatcagcttcgataaaatgactgggttatttagtcttacacattcgctcatacatgtatgaccgttaactacagagtcta

SEQ ID NO: 72 - DNA, 66 bp, Vaccinia virus
tcgtaagatactccttcatgaacataatcagttacaaaacgtttatatgaagtaaagtatctacga

SEQ ID NO: 73 - DNA, 72 bp, Vaccinia virus
ttcaccgtttgcatgttaccactatcaaccgcataatacaatgcggtgtttcctttgtcatcaaattgtgaa

SEQ ID NO: 74 - DNA, 91 bp, Vaccinia virus
tttcaggagatgatctcgccgtagctaccatgatagtagatgcctctgctacagttccttgttcgtcgacatctatctttgcattctgaaa

SEQ ID NO: 75 - DNA, 105 bp, Vaccinia virus
tgatgcattaatttttgtattgattctcaatcctaaaaactaaaatatgaataagtattaaacatagcggtgtactaattgatttaacataaaaaatagttgtta

SEQ ID NO: 76 - DNA, 72 bp, Vaccinia virus
gttgttttgcgatagccatgtatctactaatcagatctattagagatattattaattctggtgcaatatgac

SEQ ID NO: 77 - DNA, 78 bp, Vaccinia virus
actgattctggacatagctttccgactggcgcatttggtgtgatggttcccataagtttggcagctagcagattcagt

SEQ ID NO: 78 - DNA, 70 bp, Vaccinia virus
atatgtgtattatcagatatccaaaattttgtatgaagaactcctcctaggatatttgtaatatctatgt

SEQ ID NO: 79 - DNA, 75 bp, Vaccinia virus
atcatcattttttcaccattacttcttccatgtccaatatgatcatgtgagaatactaaaattcctaacgatgat

SEQ ID NO: 80 - DNA, 68 bp, Vaccinia virus
gaaattgttgctcccatggaatgacccaataagtagatttaatagttaccacgtgctgtaccaaagtc

SEQ ID NO: 81 - DNA, 65 bp, Vaccinia virus
tggttctttccatagtacatagttgttgcggtgcagaagcaataaatacagagtgtggaacacca

SEQ ID NO: 82 - DNA, 129 bp, Vaccinia virus
ttaatagtttacaccttttagtaggactagtatcgtacaattcatagctgtattttgaattccaatcacgcataaaaatatcttccaattgttgacgaagacctaatccatcatccggtgtaatattaa

SEQ ID NO: 83 - DNA, 62 bp, Vaccinia virus
ttcatccgataaactccaataaaaagatgatatatctagtgtttttgtggtattggatagaa

SEQ ID NO: 84 - DNA, 75 bp, Vaccinia virus
ttagtgacagaccagacctaggagctattctaccatagcaaatcttaggcatggacatactaatatctgtcttaa

SEQ ID NO: 85 - DNA, 66 bp, Vaccinia virus
aacaaagaaatggaaatcgtaataccagttatgtttaactttgaaattgttttttattttcttgtt

SEQ ID NO: 86 - DNA, 69 bp, Vaccinia virus
ttccactgtccaaaatgatgcctctgcctttttatacatgttccagatgtcataatattggattgggaa

SEQ ID NO: 87 - DNA, 103 bp, Vaccinia virus
ctgtgaccaagatagagagctcctttggtgaatccatctctatgtttcagtttaaccaagaaacagtcagctggtctaaaatttccatctctatctaatacag

SEQ ID NO: 88 - DNA, 60 bp, Vaccinia virus
gtttcttttagaagtgattctttgatggtgtcagcatacgaattacaataatgcagaaac

SEQ ID NO: 89 - DNA, 67 bp, Vaccinia virus
ttgatacgatatttgttggattcctgattatttactataatataatctagacagatagatgattcga

SEQ ID NO: 90 - DNA, 62 bp, Vaccinia virus
aatatcgggccaatagtagctattaccgtcgacacgtgtagtgggaactatggccaaatgtt

SEQ ID NO: 91 - DNA, 62 bp, Vaccinia virus
agacttctggcggttgccatagaatatacgtcgttcttatcccaattaccaactagaagtct

SEQ ID NO: 92 - DNA, 116 bp, Vaccinia virus
gaagtttttggagaataatatgactcatgatctatttcgtccataaacaatctagacataggaattggaggcgatgatcttaattttgtgcaatgagtcgtcaatcctataacttc

SEQ ID NO: 93 - DNA, 71 bp, Vaccinia virus
taatccctttttcagatgcctcttttagtttatcaaaaataagcgctcccctagtcgtactcagaggatta

SEQ ID NO: 94 - DNA, 73 bp, Vaccinia virus
ttaaatagttacgcaatatctcaatagtttcataattgttagctgttttcatcaagatttgtaccctgtttaa

SEQ ID NO: 95 - DNA, 68 bp, Vaccinia virus
tgccgttactattatttataactgatgtaacccacgtaacattggaattaactatcgatagtaatgca

SEQ ID NO: 96 - DNA, 93 bp, Vaccinia virus
acacgcgtgtctaactagtggaggttcgtcagctgctctagtttgaatcatcatcggcgtagtattcctacttttacagttaggacacggtgt

SEQ ID NO: 97 - DNA, 62 bp, Vaccinia virus
cagcatccggcttatccgcctccgttgtcataaaccaacgaggaggaatatcgtcggagctg

SEQ ID NO: 98 - DNA, 60 bp, Vaccinia virus
ccattaatatctctattatagcttctggacataattcatctattataccagaattaatgg

SEQ ID NO: 99 - DNA, 122 bp, Vaccinia virus
cttcattatgaattgattcttgaggtataaacctaacacaaattatattattagacttttcgtatgtaatgtctttcatgttataagtttttaatcctggaatagaatctattttaatgagg

SEQ ID NO: 100 - DNA, 61 bp, Vaccinia virus
gaagagatgtaacgggaacagggtttgttgattcgcaaactattctaatacataattcttc

SEQ ID NO: 101 - DNA, 74 bp, Vaccinia virus
gttaatacgtcttgcacgtaatctattatagatgccaagatatctatataattattttgtaagatgatgttaac

SEQ ID NO: 102 - DNA, 127 bp, Vaccinia virus
gtttttgatatcgatctgattgatcctagaactagatatattaataacgtgctcattaggcagtttatggcagcttgataattagatatagtatattccagttcatatttattagataccgcattgc

SEQ ID NO: 103 - DNA, 87 bp, Vaccinia virus
taatggtgacagggttagcatctttccaatcaataatttttttagccggaataacatcatcaaaagacttatgatcctctctcattg

SEQ ID NO: 104 - DNA, 100 bp, Vaccinia virus
tcgtttagattttccatctgccttatcgaatactcttccgtcgatgtctacacaggcataaaatgtaggagagttactaggcccaactgattcaatacga

SEQ ID NO: 105 - DNA, 62 bp, Vaccinia virus
tgatgtagtactttgatgatttttccatggcccattctattaagtcttccaagttggcatca

SEQ ID NO: 106 - DNA, 71 bp, Vaccinia virus
ttggtaactcattctatatatgctttccttgttgatgaaggatagaatatactcaatagaatttgtaccaa

SEQ ID NO: 107 - DNA, 80 bp, Vaccinia virus
tttctaagatatgggattttacttaatataatattatttcccgtaataaattttattagaaatgccaaatctataagaaa

SEQ ID NO: 108 - DNA, 73 bp, Vaccinia virus
tctagttatcaataacagttagtagtttagttatacattgaatcatacatattaatttttttattgagataga

SEQ ID NO: 109 - DNA, 60 bp, Vaccinia virus
tccgcactatcgatttgatactttcttttcagagtaaagctatcgtcattgatcatcgga

SEQ ID NO: 110 - DNA, 125 bp, Vaccinia virus
ttctagagtagtagtcctaatcattctcttaaattttatgtatcctagtttcaatgtctcgtaatgagtttgtgctgctcttattgtctgatttatttcttttaccattttggctctattctgaa

SEQ ID NO: 111 - DNA, 95 bp, Vaccinia virus
gatctatagtcttcgtatctgttacgaaaatcaatatattcaggattattttctgaatcacttgattcgtcactaatatacataactatatgatc

SEQ ID NO: 112 - DNA, 60 bp, Vaccinia virus
tgtacgattgtattgcgttactaaacgataaataattcttagtcaatgctttaacgtaca

SEQ ID NO: 113 - DNA, 68 bp, Vaccinia virus
gcgtatctactactccaaattgcagtttctggtatccatccatacgcgtaattatcaaatagatatgt

SEQ ID NO: 114 - DNA, 117 bp, Vaccinia virus
tatatcctaccgctttttatcaactatgtaatgagtttttatgttatgtcttttagttaggttaatattctaataagatgctaatacatcaggttaaagtattagaatgggattata

SEQ ID NO: 115 - DNA, 80 bp, Vaccinia virus
atcagaccatatactgagttggctactatcttgtacgtatattgcatggaatcatagatggccttttcagttgaactggt

SEQ ID NO: 116 - DNA, 69 bp, Vaccinia virus
tagtcacgactgaaataaccgcgtgattattttttggtataattctacacggcatggtttctgtgacta

SEQ ID NO: 117 - DNA, 119 bp, Vaccinia virus
tcatccaatattattgaaatgacgttgatggacagatgatacaaataagaaggtacggtacctttgtccaccatctcctccaattcatgctctattttgtcattaactttaatgtatga

SEQ ID NO: 118 - DNA, 64 bp, Vaccinia virus
tcgtcggtattttttatggcaaactttactcttccagcatccgtttctaaaaaaatattaacga

SEQ ID NO: 119 - DNA, 62 bp, Vaccinia virus
accattccaagtcactgtgtgtaagaagattatattctatcataagcttgactacatttggt

SEQ ID NO: 120 - DNA, 84 bp, Vaccinia virus
atatctttaactaagtcaatgatttcatcaaccgttagatctattttaaagttaatcatataggcattgatttttaaaaggtat

SEQ ID NO: 121 - DNA, 75 bp, Vaccinia virus
cagccgaaacatattctaccatggctccgtttaatttgttgatgaagatggattcatccttaaatgttttctctg

SEQ ID NO: 122 - DNA, 74 bp, Vaccinia virus
ccgtttttagaccgagactccatccgtaaaaatgcatactcgttagtttggaataactcggatctgctatatgg

SEQ ID NO: 123 - DNA, 125 bp, Vaccinia virus
cgcttctatcttgtttagatttatttttataaagtttagtctctccttccaacataataaaagtggaagtcatttgactagataaactatcagtaagttttatagagatagacgaacaattagcg

SEQ ID NO: 124 - DNA, 113 bp, Vaccinia virus
gacatacatactatctttaatagaactcttttcatccagttgaatggattcgtccttaaccaactgattaatgagatcttctattttatcattttccagatgatatgtatgtc

SEQ ID NO: 125 - DNA, 102 bp, Vaccinia virus
tacaaaggagatgatttatctatggtattaagaattcgtttttcgacatccgtcaaaaccaattcctttttgcctgtatcatccagttttccatcctttgta

SEQ ID NO: 126 - DNA, 66 bp, Vaccinia virus
tgtcactttgttattggccaacctttgttgtacaaattcctcggccattttaatatttaagtgata

SEQ ID NO: 127 - DNA, 64 bp, Vaccinia virus
ttgctagacaccttttcaatgtttaatttttttgaaataagctttgataaagccttcctcgcaa

SEQ ID NO: 128 - DNA, 98 bp, Vaccinia virus
caccgcctctagatatcgcctttatttccacattagatggtaaatccaatagtgaaactatctttttaggaatgtatggactcgcgtttagaggagtg

SEQ ID NO: 129 - DNA, 63 bp, Vaccinia virus
gacactttgccggcggttgtagatttatcatatttctccactacatatccgttacaatttgtt

SEQ ID NO: 130 - DNA, 67 bp, Vaccinia virus
gagacttgatagatattagtgatgaattgaaaattatttttatcaccacgtgtgtttcaggatcatc

SEQ ID NO: 131 - DNA, 79 bp, Vaccinia virus
ggctattctggcggctagaatggcataatccggatgttgtgtagtacaagtggctgctatttcggctgccagagtgtcc

SEQ ID NO: 132 - DNA, 93 bp, Vaccinia virus
tatatacgataagatatgtttattcataaacgcgtcaaatttttcatgaatcgctaaggagtttaagaatctcatgtcaaattgtcctatata

SEQ ID NO: 133 - DNA, 63 bp, Vaccinia virus
tctggttctatgttcctcgtttcctgtattctttttaagatcgaggaacgccataatatcaga

SEQ ID NO: 134 - DNA, 77 bp, Vaccinia virus
ggaacaaatatagtatctgaaatcatattcatatatcccgttagaggtctatgataatatatagtagcgtttgttcc

SEQ ID NO: 135 - DNA, 60 bp, Vaccinia virus
ttccttttcgttgatctctcatagatttagaaataaattcttgcgatcctccaaaaggag

SEQ ID NO: 136 - DNA, 81 bp, Vaccinia virus
attggaattataatataggtgtatttgcgcactcgcgacggttgatgcatcggtaaatatagctgtatctaatgttctagt

SEQ ID NO: 137 - DNA, 66 bp, Vaccinia virus
gtatatcatcagctgaaaaactatgttttacacgtattccttcggcatttctttttaatgatatat

SEQ ID NO: 138 - DNA, 98 bp, Vaccinia virus
acaactatgccttttagattatctcctaatttataacacggccgtatacacttggaatacttgtacaatctaagataaactaaatctcgcaaagttgt

SEQ ID NO: 139 - DNA, 70 bp, Vaccinia virus
ggattttagaatttccaaattcaccagcgatttatcggttttggtgaaatccaaggatttattaatgtcc

SEQ ID NO: 140 - DNA, 88 bp, Vaccinia virus
atggtcgaagtatagcaggacattgatgctctagaccgtgtataacaaaatctacaaatttttcatccgctatattttgtttcactat

SEQ ID NO: 141 - DNA, 100 bp, Vaccinia virus
ggtgttaatccactatatgtttctgtagcggctgataacacagcatccaactgagcatccgcgtccgcagagcacatatttttaacagtgaggttacatc

SEQ ID NO: 142 - DNA, 84 bp, Vaccinia virus
gttagcaagaaattaacattggcattcgaacactctggatcccaacattctcgaggttccgcatattttaatgactcttctaac

SEQ ID NO: 143 - DNA, 76 bp, Vaccinia virus
tcagtgggtactcccggaggcggatcccgtttagggagctcaacacttactccgccacccatatttatctcattga

SEQ ID NO: 144 - DNA, 69 bp, Vaccinia virus
acacgactgtggtagatttgttctatagagccggttgccgcaaatagatagaactaccaatatgtctgt

SEQ ID NO: 145 - DNA, 78 bp, Vaccinia virus
acagtttgaaaaataacagtatcatttaaacatttaacttgcggggttaatttcacaactttactgtttttaagctgt

SEQ ID NO: 146 - DNA, 130 bp, Vaccinia virus
ccacctgttttaacatataataggcaggagatagatatccgtcattgcaatattccttttcgtaggcacacaatctaatattgataaaatctccattctcttctctgcatttattatcttgtttcggtgg

SEQ ID NO: 147 - DNA, 83 bp, Vaccinia virus
tactttttctttaccttgagaatatccatcgtttgcttggtcaatagcgatatgtgattttttatcaaccactcgaaaaagta

SEQ ID NO: 148 - DNA, 75 bp, Vaccinia virus
tagtactagactgacttctaacaaacatctcacctgccataaataaatgcttgatattaaagtcttctatttcta

SEQ ID NO: 149 - DNA, 60 bp, Vaccinia virus
aaattattcttatcatgcgtccatagtcccgttccgtatctattatcgttagaatatttt

SEQ ID NO: 150 - DNA, 87 bp, Vaccinia virus
acatccatttttaagtattatattaaaatttaatcaatgtttatttttagttttttagataaaaaatataatattatgagtcgatgt

SEQ ID NO: 151 - DNA, 92 bp, Vaccinia virus
attttattaccgtgtgggatataaaagtccttgatccattgatctggaaacgggcatctccatttaagactagatgccacggggtttaaaat

SEQ ID NO: 152 - DNA, 62 bp, Vaccinia virus
ctatcggtttactatttattgataacgcagatgtttgagttgtcatccatggtaatccatag

SEQ ID NO: 153 - DNA, 105 bp, Vaccinia virus
gtacatgtgaaaatagtcatattcctgattaggataatcaaagttaacaactactttgttacggacgatcttattaaggtagtacatctttttttcataatttac

SEQ ID NO: 154 - DNA, 65 bp, Vaccinia virus
tgaagaacatatttaattcagatctaaaaaatacatatattagaatgaatacaacgaatacttca

SEQ ID NO: 155 - DNA, 130 bp, Vaccinia virus
cagctacttctacccaatcaccaggcaataaatgtattttatttttaataaactttccttggcgtattcttgttaattggtttaatcgtttattaaagtaaaatttaacttggtttgacgctaatagttg

SEQ ID NO: 156 - DNA, 70 bp, Vaccinia virus
ttgcaagtttctgtttctgagagtaaacgaatccctgttttattttattccacagagcactaatttccaa

SEQ ID NO: 157 - DNA, 76 bp, Vaccinia virus
ccgcttctatttactcccgcagcacaatgaaccaacacgggctcgtttcgttgatcacatttagataaaaaggcgg

SEQ ID NO: 158 - DNA, 78 bp, Vaccinia virus
gttaggcaatgtatatttatccatcgtcaaatttaaaacatatttgaacttaacttcagatgatggtgcatccatagc

SEQ ID NO: 159 - DNA, 64 bp, Vaccinia virus
actttttatgaagagccgcgtttaacaatgctttattgtctccgaacgtagctctcttaagagt

SEQ ID NO: 160 - DNA, 64 bp, Vaccinia virus
tcgtcatatcccgtatagtcagagataggaatcttgaatttactaatcttgcccttgttggcgg

SEQ ID NO: 161 - DNA, 60 bp, Vaccinia virus
cgcctaatagcttgcggcagatatgttttcttatccaatcgcatagctataaaataggcg

SEQ ID NO: 162 - DNA, 63 bp, Vaccinia virus
gcgcactaattgccaatataataacaaagaatataagtgttgatgttttggctgcttgtacgc

SEQ ID NO: 163 - DNA, 74 bp, Vaccinia virus
aatacgagttatattttcgtctatccattgtttcacatttacatatttcgacaaaaagatataaaatgcgtatt

SEQ ID NO: 164 - DNA, 75 bp, Vaccinia virus
gccgatctctgaatggatactagttttctaagttctaatgtgattctctgaaaatgtaaatccaattcctccggc

SEQ ID NO: 165 - DNA, 70 bp, Vaccinia virus
gcggtataattagtttttttctctcaatttctatttttagatgtgatggaaaaatgactaattttgtagc

SEQ ID NO: 166 - DNA, 70 bp, Vaccinia virus
gtggaaacgataactgtatttttaatcacgtcagcggcatctaaattaaatataggtatatttattccac

SEQ ID NO: 167 - DNA, 72 bp, Vaccinia virus
aaattcatgtgaaactttgtcctttcctacaaacttgataactatttcatcgggacttatttctatgtgttt

SEQ ID NO: 168 - DNA, 92 bp, Vaccinia virus
aattgttcggctatactcgatgcgtgagtcttgcattcatctccagatatcggagtgagggtcagatccaaatattgagaagccttataatt

SEQ ID NO: 169 - DNA, 62 bp, Vaccinia virus
accgtcgatactgcagagattctagtaataattttcttaagatctttaacgatattgtcggt

SEQ ID NO: 170 - DNA, 68 bp, Vaccinia virus
aggagatggagaatttttttcagttgtttgatgatattcctctataactacttcttcttccacttcct

SEQ ID NO: 171 - DNA, 120 bp, Vaccinia virus
ggagaaagaattacattctctggagaagccataaatatatgacgtgatagagtcgtcaattcctttattagttcatcatatggaactttttcattgtctctaggtgtgaattctatttcc

SEQ ID NO: 172 - DNA, 87 bp, Vaccinia virus
ggataagttattcatgacggtagcataatgtctcggatgaaaagaataatggatagcaaactgccagtcgatgatattaaactttcc

SEQ ID NO: 173 - DNA, 61 bp, Vaccinia virus
gtatttctttgacttgaatactatccgatcacaaatatccactagtttagattcaacatac

SEQ ID NO: 174 - DNA, 61 bp, Vaccinia virus
gttatctatagcatctactaactgtacattttttacatctagaccatgtaccttagataat

SEQ ID NO: 175 - DNA, 120 bp, Vaccinia virus
tcctttaccatttctaaaatagtcgttgccatgtaagctctttttgaaattgatggagtatgacctaccacttcagcagtttgtttgatagttaacgctattaacttttttggtgacgga

SEQ ID NO: 176 - DNA, 88 bp, Vaccinia virus
tagtggcttctaatcagatgttctaataaatattttaaaaatgaatcttgattaaaaatcatatcattgaccatttgtctggctactg

SEQ ID NO: 177 - DNA, 87 bp, Vaccinia virus
ttgattttctttctaatactatatatttctctcgaagaagttcttgcacatcatctgggaataaaatactactgttgagtaaatcag

SEQ ID NO: 178 - DNA, 67 bp, Vaccinia virus
aggtatcggtctctactgaatctactaacatgtctcgtatgttagcttctacagtctttcgtttcct

SEQ ID NO: 179 - DNA, 65 bp, Vaccinia virus
cgtcattattttcagcagcctctctaccagaaggttgagaaaagtgtgttctgaatcgcacgacg

SEQ ID NO: 180 - DNA, 111 bp, Vaccinia virus
gggtgtaggatatagtttcataataggaacatgatattttttgtaccatttcaccaacaagtatagaaatgcaaatctatatctattattttgtattttaccatctaaccc

SEQ ID NO: 181 - DNA, 120 bp, Vaccinia virus
gaatagttacatttgattcatcttcgatgtttaatgttcctctgactatatccccaacgtgataatacgcgtaggttattacacacggaacgtttataactacagaattattaactattt

SEQ ID NO: 182 - DNA, 89 bp, Vaccinia virus
gctaccaaggcgaacaacaaagcgattattgttttacctgatcccataatatggaacaataacacgcttctgttctcatctatgatagt

SEQ ID NO: 183 - DNA, 81 bp, Vaccinia virus
tcaggcatttcgtaatatgatattcttcctttaagcaaatccttaagtacattcacacctcgttcgttaagaagtgtctga

SEQ ID NO: 184 - DNA, 67 bp, Vaccinia virus
aagaatatagaaataatgataagtccatcatcgtgtttttttgcctcttcataagaactatattttt

SEQ ID NO: 185 - DNA, 60 bp, Vaccinia virus
cttgatagttgttcctagatatgtaaaataatccaacgtactaggtagcaaattgtctag

SEQ ID NO: 186 - DNA, 102 bp, Vaccinia virus
taatatacttgcgtgtcgtcgttcaatttatacggatttctatagttctctgttatataatacggttttccatcatgattagacgacgacaatagtgttcta

SEQ ID NO: 187 - DNA, 82 bp, Vaccinia virus
gcggacacggatactcgtttatgacaccataggcattggttaacgaatgccgtgagtgtaataatttgagagtcatcctcgc

SEQ ID NO: 188 - DNA, 91 bp, Vaccinia virus
tttcctgtttggacaaataattggaataattcagaaataatcgtttctttctaaacatgtttctagttctaattatttcagaatagagaaa

SEQ ID NO: 189 - DNA, 62 bp, Vaccinia virus
cgggattgtccggcatatcatgtagatagttaccgtctacatcgtatactcgaccatctacg

SEQ ID NO: 190 - DNA, 71 bp, Vaccinia virus
gccattataaagtgcacgtttacatatctacgttctggaggagtaagaacgtgactattgagacgaatggc

SEQ ID NO: 191 - DNA, 65 bp, Vaccinia virus
gctcttgaaaccaaggttttccaaccggactcattgtcgatcggtgagaagtctttttcattagc

SEQ ID NO: 192 - DNA, 110 bp, Vaccinia virus
aattcagtaaatagagagatatcagccgcactagcatcccctttcaatagttctccctttttaaaggtatctaatgcggatttagaaaactctctatttcttaatgaatt

SEQ ID NO: 193 - DNA, 63 bp, Vaccinia virus
gaacgtaaacgtagtagccatacgtctcagaattctaaatgatgatatacctgtttttatttc

SEQ ID NO: 194 - DNA, 83 bp, Vaccinia virus
tattaacgtatcgcattaatactgttttcttagcgaatgatgcagacccttctacgtcatcaaaaatagaaaactcgttatta

SEQ ID NO: 195 - DNA, 61 bp, Vaccinia virus
tcaaagactagacatttaccatgggatgctaatattcccaaacatacatctataaatttga

SEQ ID NO: 196 - DNA, 75 bp, Vaccinia virus
atgtatagattgttttcagtgagatgattattagatttaatagcatctcgttcacgtttgaacagtttattgcgt

SEQ ID NO: 197 - DNA, 83 bp, Vaccinia virus
taatgacgcatattctactcttggaattaatagttttgatattagtaaaaaatttatttctaaaattttgatcatcgtaatta

SEQ ID NO: 198 - DNA, 63 bp, Vaccinia virus
taatggcggaaaactttttagaaatgttatatataaaagaattttttcgtgttccaaacatta

SEQ ID NO: 199 - DNA, 81 bp, Vaccinia virus
tatataatctttttcatcttgtgagtaccctggatacgaaataaatttattatccgtatttccataataaggtttagtata

SEQ ID NO: 200 - DNA, 67 bp, Vaccinia virus
agatactataccgttgtgtctacaaccgctacataatcgtagattcatgttaacactctacgtatct

SEQ ID NO: 201 - DNA, 77 bp, Vaccinia virus
agcgagtgcttcttctttagcgggcttaaagactgctttaggtgctgaaataaccacatctggaaggcttactcgct

SEQ ID NO: 202 - DNA, 61 bp, Vaccinia virus
gaagagatagatacgtgattaatacatttatatccaacatatggtacgtaaccgaatcttc

SEQ ID NO: 203 - DNA, 64 bp, Vaccinia virus
tgtcttagaaggagtgttttcttggcaaaagaataccaagtgcttaaatatttctactacttca

SEQ ID NO: 204 - DNA, 71 bp, Vaccinia virus
tactgaatccgcctaagcgtgttcttctgcatgtgcggataatttaactactatattggcggaggacggta

SEQ ID NO: 205 - DNA, 80 bp, Vaccinia virus
aatatttagtttattcataatgttaagcatatcctgaatagtaaagttagatgtgtcatacttgttagtagttagatatt

SEQ ID NO: 206 - DNA, 90 bp, Vaccinia virus
aggatgagtacatttcacagaaacactagcattgttcaatgtgctctttacatgggtaaggagttgaaatagctcgtttctatttgttct

SEQ ID NO: 207 - DNA, 72 bp, Vaccinia virus
gatggcggcgtcgtcgttttttgatctttattaaatttagagataatatcctgaacagcattgctcggcgtc

SEQ ID NO: 208 - DNA, 83 bp, Vaccinia virus
gttatagctttctgctattatacccgctatttcaaatagacttatacgtctagtatagcgtcgtttaagagcagatatatgat

SEQ ID NO: 209 - DNA, 80 bp, Vaccinia virus
gtttttgaagtttccaaattttgataatatagtctagatggaattttagaccatctttgtcaaaatcgtttaccgacaac

SEQ ID NO: 210 - DNA, 63 bp, Vaccinia virus
aggatctagataattaataatgatgggttttctattcttattctttgtattttggcatatcct

SEQ ID NO: 211 - DNA, 111 bp, Vaccinia virus
cagagttgggatagtatttttctaacgtcggtattatattattaggatctacgttcatatgtatcataatattaatcatccacgttttgataaatctatctttagcttctg

SEQ ID NO: 212 - DNA, 67 bp, Vaccinia virus
cgtataaattttagaaataacattagcgaattgttgtgcattgatgtcgttattctgaaacagtatg

SEQ ID NO: 213 - DNA, 84 bp, Vaccinia virus
tagagttaagagagattagagtttgtacattaagcaacatgtctctaaatgtggctacaaacttttccttttccacatcatcta

SEQ ID NO: 214 - DNA, 68 bp, Vaccinia virus
gagtcattcgaagcgtcaatagaatatgtctcttaactatttccggctgttgtatatttaaatgactt

SEQ ID NO: 215 - DNA, 104 bp, Vaccinia virus
gacttgactagatcgtcagtagtaatttgtgcatcgtctattctgcatccgcttcgtcgaataatgtatagcatcgctttgagattctccatagctatcaagtc

SEQ ID NO: 216 - DNA, 91 bp, Vaccinia virus
ataatagtggccggagaatcatcatctggaaatagatcttcattaagttgtgaggatatttcctctggagatgacactacggcggcattat

SEQ ID NO: 217 - DNA, 93 bp, Vaccinia virus
gataatgtttatgacaataataatcacgttagtgacgataatttttcgttttctactttcgtgatattgtttaatcgttttatagattctatc

SEQ ID NO: 218 - DNA, 67 bp, Vaccinia virus
gttgttgacgttgttccgatatcaataactctctacgaaacgtaggaggtggagtatcgtcaataat

SEQ ID NO: 219 - DNA, 116 bp, Vaccinia virus
tagtattctggtaaaattatctaaattatcagatgattttgtattagatcgttgatttctaagattaaccacttcatcctccaacatctgaattcttttatctttatcataaacta

SEQ ID NO: 220 - DNA, 62 bp, Vaccinia virus
ataaagtcttggtatgactcctttctaatatagtacggactacctttgtcacccaactttat

SEQ ID NO: 221 - DNA, 87 bp, Vaccinia virus
gctgaagtaattaatttttctgcctcgtttttactacaactagttttcatcaatgtagtgacgatgtattgtttagttactcttggt

SEQ ID NO: 222 - DNA, 92 bp, Vaccinia virus
gggtattaataatatctatatttccagcgttaagtgtaacattaaacagttttaattcacgtgacgtggtatcaattaaataattaatgccc

SEQ ID NO: 223 - DNA, 101 bp, Vaccinia virus
gttctagtacaattagacgtaagttctgcttgggaattttttaacgctaaagagttaacgttaatcgtgcacccaacgtatttacatctagttctttgaac

SEQ ID NO: 224 - DNA, 65 bp, Vaccinia virus
tgattttggtttacatgtaatacattttgaactctttgattttgtatcacatgcgccggcagtca

SEQ ID NO: 225 - DNA, 125 bp, Vaccinia virus
actactatttaattttaccatatcttcgaaaacaaaaatagatattatttttgcagtacaaactattgtttttatatggtttatattccactttgttcattcggcgatttaaaatttttattagt

SEQ ID NO: 226 - DNA, 61 bp, Vaccinia virus
gaagagtaatgtatagaggacgttttgattcgatcattttcctcatattagaaactacttc

SEQ ID NO: 227 - DNA, 85 bp, Vaccinia virus
tcctagtttatctacagacagactaataattcgttgcatgaaatttcctatcatgtactttatttctttgatggatgtgctagga

SEQ ID NO: 228 - DNA, 71 bp, Vaccinia virus
aaagaattatacttttctatagccgcagaatctgaaaatctcaaacttttgtacagactaagtaattcttt

SEQ ID NO: 229 - DNA, 61 bp, Vaccinia virus
aagtaaagatattgacttggatggtattttctgacagaaaacatctttgaaatctttactt

SEQ ID NO: 230 - DNA, 74 bp, Vaccinia virus
ccgttataaatgtctttgtcgatgatatattcaacgcttccaattgtgatatatccagagatatcttgtaatgg

SEQ ID NO: 231 - DNA, 73 bp, Vaccinia virus
tcatctaatgccgtagccgtaagtacgtggtttacaacattagctacttctttaaagtactcgttttggatga

SEQ ID NO: 232 - DNA, 64 bp, Vaccinia virus
tgtgattgattcccactaatgaagatgccacatatccatctctaaattcggcaggaaagtcaca

SEQ ID NO: 233 - DNA, 70 bp, Vaccinia virus
aatgctcgcaacattaacatcttgaaccgttggtacaattccgttccataaatttataatgttcgccatt

SEQ ID NO: 234 - DNA, 78 bp, Vaccinia virus
atggagattttctattctcgtccattttaggatatgctttcataaagtccctaataacttcgtgaataatgtttctat

SEQ ID NO: 235 - DNA, 65 bp, Vaccinia virus
tctttttagccagagatatcatagccgctcttagagtttcagcgtgattttccaacctaaataga

SEQ ID NO: 236 - DNA, 69 bp, Vaccinia virus
ttgcttcgcgtttagcctctggctttttatcagcctttgtagaaaaaaattcagttgctggaattgcaa

SEQ ID NO: 237 - DNA, 99 bp, Vaccinia virus
acaccagaaaagacggcttgagatcaactttatctaatggtttataaaacgaaggaggccttcgttcgaaatctaatttgacttttacgcctctggcgt

SEQ ID NO: 238 - DNA, 113 bp, Vaccinia virus
tgtgagaagtttgcctcgttaaggtcttccatttaaatattatataaacatttgtgtttgtatcttattcgtcttttatggaatagttttttactagtaaagctgcaattaca

SEQ ID NO: 239 - DNA, 66 bp, Vaccinia virus
atagatgccatgttaaaaatgtccgccgtcgactttttggaacgattgataaaagctggtgtttat

SEQ ID NO: 240 - DNA, 64 bp, Vaccinia virus
atagcatcatctttagatcattaattgttaccttccccaatacaaccaaatcatcatgatatat

SEQ ID NO: 241 - DNA, 130 bp, Vaccinia virus
ctttggcttataaaatacaaatgacattcccttatgtttaatcttaatcttttctttagttattgaatcgttacaattataaaatgatgttttttccaaaaacctaagtgtatttaaaatagatgccatg

SEQ ID NO: 242 - DNA, 75 bp, Vaccinia virus
tacgacactgataaaccgcattatctgtggacattttaatgttggtatctagataacaatgtttatcgtattgta

SEQ ID NO: 243 - DNA, 73 bp, Vaccinia virus
tgtatcctcaacataatcaatgagccaggtaatcaagacatcggatttattgggtagtgttgatgattccgca

SEQ ID NO: 244 - DNA, 120 bp, Vaccinia virus
gatttggccaaatgtatccatcataatctgggttataaacgggtgtaaacaagaatatatgtttatattttttaactagtgtagaaaacagagatagtaaatagatagtttttccagatc

SEQ ID NO: 245 - DNA, 62 bp, Vaccinia virus
agcgaagctatcatcgtccaatatctcattcctagaaatattatctacgtcattgttttgtt

SEQ ID NO: 246 - DNA, 87 bp, Vaccinia virus
gtggtattatactcatgcctagtaatagtctctttgcgttgacggaaagcagactagaaataacaggctaaaatgttcagacaccat

SEQ ID NO: 247 - DNA, 74 bp, Vaccinia virus
ggcaaataattaatcagtgatagattgtttacatacagtatgtcgtttgtaaacgatgttaccaatcgtttgct

SEQ ID NO: 248 - DNA, 68 bp, Vaccinia virus
ggaattttgacaattctctttgagccgatagtatcagtgaaaagaatgtaaactttgtcataagtacc

SEQ ID NO: 249 - DNA, 62 bp, Vaccinia virus
atattacgcagcaagcataaccagcataatctgtcttaggtttgttcattgtcgtgtggtgt

SEQ ID NO: 250 - DNA, 123 bp, Vaccinia virus
gataaaaatgtagtgtaattgttatatagtgtaacacgaatgcagtttgggagtattcgttgtgctacaaatatatttccattcttcgtggcatttttagctataaaattatatggggttgtc

SEQ ID NO: 251 - DNA, 73 bp, Vaccinia virus
ttttatcgttttatctattgatggtgtatgaactaatttacgttctacaacttttaatagtgtcgctgtaaaa

SEQ ID NO: 252 - DNA, 84 bp, Vaccinia virus
tattggattgtatattttattttatattttatattttatattttgtaataagaataaaatgctaatgtcaagtttattccaata

SEQ ID NO: 253 - DNA, 70 bp, Vaccinia virus
tgttaattttactagatcgtcatgggtcatagaatttataggttccgtagtccatggatccaaactagca

SEQ ID NO: 254 - DNA, 82 bp, Vaccinia virus
ggagtattccaagagttttagttgtctagtatttaacaagagaagagatttcaacagactgtttatgaactcgaatgccgcc

SEQ ID NO: 255 - DNA, 103 bp, Vaccinia virus
gttttctaaagatgtcattaaaccctcgatcatgaatggatttatcatcatcgtttttatgttggacatgagcttagtccgtttgtccacatctatagacgac

SEQ ID NO: 256 - DNA, 70 bp, Vaccinia virus
tcggatgaccatatatttattttcagttttattatacgcataaattgtaaaaaatatgttaggtttacga

SEQ ID NO: 257 - DNA, 64 bp, Vaccinia virus
tataaggtgattggaatgggataaatacaacaattatattttttatcatatccttcacgctata

SEQ ID NO: 258 - DNA, 72 bp, Vaccinia virus
attcgcgaagcgacgtcatttaataaaaaaagtatttttttttaatatttttcacaaatatcgttcgcggat

SEQ ID NO: 259 - DNA, 90 bp, Vaccinia virus
tatcttggcaataactaattgagatattgatgcgagttcggtatgcatatcggacacgtatccgagtactgattccaagttgccagagta

SEQ ID NO: 260 - DNA, 80 bp, Vaccinia virus
atagatatgataacaggaataacatctttaggtttaaaataattatatacaccagtaggagtcttgtcatcgtcatctat

SEQ ID NO: 261 - DNA, 75 bp, Vaccinia virus
gagtcgtccatattttattctgaggcctaatagacctctgtacataaaatattcctctagaatagtagacatctc

SEQ ID NO: 262 - DNA, 105 bp, Vaccinia virus
ggatattcttgatacattctttttatacagtgaattgcatacatccgatacagcattatccatatatggcaaatctgcaatcactgtattgtttttagattgtcc

SEQ ID NO: 263 - DNA, 62 bp, Vaccinia virus
gtagtcaccgtaaatttatcaccagaaatactaatatctatctttatgtccatggtgatcac

SEQ ID NO: 264 - DNA, 105 bp, Vaccinia virus
tatctatcagattattatgtgttataaggtactttttctcataataaactagagtatgagtaagatagtgtttttcaaaacatataaatctaaaattgatggatg

SEQ ID NO: 265 - DNA, 102 bp, Vaccinia virus
aaagtattggtaatcgtgtcatattagtataaaaagtgatttatttttacaaaattatgtattttgttctatcaactacctataaaactttccaaatacttt

SEQ ID NO: 266 - DNA, 82 bp, Vaccinia virus
atggcagatccaatttgtaaaaaatcagcggttgaaagaatatatttcacgttatcgttagttaggctcaaaggtatcccat

SEQ ID NO: 267 - DNA, 67 bp, Vaccinia virus
cgtgaagatatcatttcccatgtattttttttatgattgtagcagtttatggaaattttatcacgcg

SEQ ID NO: 268 - DNA, 77 bp, Vaccinia virus
cttggtataattatcaaaatacaagacgtcgcttttagcagctaaaagaataatggaattgggctccttataccaag

SEQ ID NO: 269 - DNA, 72 bp, Vaccinia virus
taccttatcaaatgatcctgttgggcattttctacattgatgacatccattagaataattgggattgtggta

SEQ ID NO: 270 - DNA, 64 bp, Vaccinia virus
tcgctacttggttagtgtattattcagtatgaagacctattaataattacttatcttttgacga

SEQ ID NO: 271 - DNA, 71 bp, Vaccinia virus
ttttggtaatctattattattggctctgatcaccgcatctagatctacacctaatctattaattaccaaga

SEQ ID NO: 272 - DNA, 78 bp, Vaccinia virus
tttggtcgatgtaaaatttttgtcgataaaaattaaaaaataacttaatttattattgatctcgtgtgtacaaccgaa

SEQ ID NO: 273 - DNA, 70 bp, Vaccinia virus
gattctcgtcgtacccaccgagagcgtgtgcgtaaaacatcgccatgatttcggttgtacacacgagatc

SEQ ID NO: 274 - DNA, 60 bp, Vaccinia virus
cgtattatacgcattataactgacagcgtcgtaaatagatgtttcgttgtatatagtacg

SEQ ID NO: 275 - DNA, 102 bp, Vaccinia virus
ggtagcaatttatggaacttatattggtcattatttttgtcacaggaacaaactaatactataacggagattaaaaatatgacgcccataattgttaacgcc

SEQ ID NO: 276 - DNA, 90 bp, Vaccinia virus
gtatcataattttcaaagatggtcgtttagacaatagtacttccattattattttgttgttgtttgcgactgcttccgaaatacatgtac

SEQ ID NO: 277 - DNA, 60 bp, Vaccinia virus
tgttctctatagttacattaattaaaattttatatgtgacacccattcatctggagaata

SEQ ID NO: 278 - DNA, 111 bp, Vaccinia virus
catcttttaccaacacaaagggtggatatttgttcattggagttgataataatacacacaaagtatttggattcacggtgggttacgactacctcagactggtagagaatg

SEQ ID NO: 279 - DNA, 64 bp, Vaccinia virus
gtacgcgtgtcgattcatcaaggtatataaacctggggatgaggctacctcgacatacgtgtgc

SEQ ID NO: 280 - DNA, 62 bp, Vaccinia virus
taattttttataaactaacattgttaattgaaaagggataacatgttacagaatataaatta

SEQ ID NO: 281 - DNA, 77 bp, Vaccinia virus
aacacggcagaatatcgcccatatactttatttatggatttgaatgagatattctgagcgctaaccttatccgtgtt

SEQ ID NO: 282 - DNA, 107 bp, Vaccinia virus
agtagcatacggatgctcgatgtacaaattgatatggtcgtcgtattcagtcaatgttacagtcggtggtccaatttttacttcgacgcatagtcccgtacaatact

SEQ ID NO: 283 - DNA, 98 bp, Vaccinia virus
ccctattttcaatccccatgtttcctcttcagtcttctcacatcgtctaatagacatggagtagatgatagaggggaacagaaggactataatcaggg

SEQ ID NO: 284 - DNA, 87 bp, Vaccinia virus
gaaaagacgtgggtactaaagttggctgtcatcttaccaattgcaattggaagaacaacgacctgcactaataccacatgttttttc

SEQ ID NO: 285 - DNA, 60 bp, Vaccinia virus
gtcgttaaaagcgcttctatatctctcattagctagaattatagatacgctattaattat

SEQ ID NO: 286 - DNA, 60 bp, Vaccinia virus
tggtcgtgtagcgcgatagagatagtctaatattaatattagatatccgtaacactacca

SEQ ID NO: 287 - DNA, 64 bp, Vaccinia virus
gacatggtaagattactggctcgttttctaactccatgaatgatgcaaaatattaccctttgtc

SEQ ID NO: 288 - DNA, 91 bp, Vaccinia virus
aagggtggaatgcgatacattgatctatgtagttttaaaacacacgcaaactttgaagaatttatataaatcattccatcgatacatcctt

SEQ ID NO: 289 - DNA, 73 bp, Vaccinia virus; identical to SEQ ID NO: 44

SEQ ID NO: 290 - DNA, 74 bp, Vaccinia virus
ataattcagtaataataattcagtaatgtatataaaaatgcattgtatatttactccaatactactgtagttgt

SEQ ID NO: 291 - DNA, 76 bp, Vaccinia virus
atagagtctacatttatatgttctctatcggtgagatacaaatacctagatagtcgcgtatcttcatccattctat

SEQ ID NO: 292 - DNA, 60 bp, Vaccinia virus
atatcttcagtacatcgtttgtaaagtaattattatacaaatagcagtgtagtgcagtat

SEQ ID NO: 293 - DNA, 130 bp, Vaccinia virus
attgcacgaagttcttcggcggttttcatggagtcatttctgatgaaacatttaatgatctccacgcaattgtcgatattgtcccacggaagtgaatccttcaactcaccaccaaagagctccgttgcat

SEQ ID NO: 294 - DNA, 73 bp, Vaccinia virus
ccacatcctttattaataataatttaacaatctctatatctatggttgagaaagaccagtagtattggatggg

SEQ ID NO: 295 - DNA, 66 bp, Vaccinia virus
gaaggtagtaatgttagtagacaatttttatctgtgaaaacaggaaatagtttatcatataccttt

SEQ ID NO: 296 - DNA, 67 bp, Vaccinia virus; identical to SEQ ID NO: 46

SEQ ID NO: 297 - DNA, 82 bp, Vaccinia virus
ggccttttttatcgttatcggttttctacactcacctggtttataaacgtgtgcgagacacaaataataataatgtaacgct

SEQ ID NO: 298 - DNA, 89 bp, Vaccinia virus
tcataatattagaatatattttaaaggacttatcgttattatatttttttaactcggtgaggtatcttcttaactttctcgaattatga

SEQ ID NO: 299 - DNA, 65 bp, Vaccinia virus
ttctgaaagagatgagaagcctgtagagagaccctgcgctttctctatgggtccatctatgagaa

SEQ ID NO: 300 - DNA, 75 bp, Vaccinia virus; identical to SEQ ID NO: 54

SEQ ID NO: 301 - DNA, 102 bp, Vaccinia virus
tttttataaacatgaaaccactgtctaaatgtaattatgatcttgatttatagatgaagatcagcctttagaggattttaaccagtatgtttaatatgaaaa

SEQ ID NO: 302 - DNA, 126 bp, Vaccinia virus; identical to SEQ ID NO: 37

SEQ ID NO: 303 - DNA, 72 bp, Vaccinia virus; identical to SEQ ID NO: 38

SEQ ID NO: 304 - DNA, 79 bp, Vaccinia virus; identical to SEQ ID NO: 39

SEQ ID NO: 305 - DNA, 79 bp, Vaccinia virus; identical to SEQ ID NO: 40

SEQ ID NO: 306 - DNA, 123 bp, Vaccinia virus; identical to SEQ ID NO: 1

SEQ ID NO: 307 - DNA, 124 bp, Vaccinia virus; identical to SEQ ID NO: 2

SEQ ID NO: 308 - DNA, 124 bp, Vaccinia virus; identical to SEQ ID NO: 2

SEQ ID NO: 309 - DNA, 124 bp, Vaccinia virus; identical to SEQ ID NO: 2

SEQ ID NO: 310 - DNA, 124 bp, Vaccinia virus; identical to SEQ ID NO: 2

SEQ ID NO: 311 - DNA, 124 bp, Vaccinia virus; identical to SEQ ID NO: 2

SEQ ID NO: 312 - DNA, 124 bp, Vaccinia virus; identical to SEQ ID NO: 2

SEQ ID NO: 313 - DNA, 124 bp, Vaccinia virus; identical to SEQ ID NO: 2

SEQ ID NO: 314 - DNA, 124 bp, Vaccinia virus; identical to SEQ ID NO: 2

SEQ ID NO: 315 - DNA, 124 bp, Vaccinia virus; identical to SEQ ID NO: 2

SEQ ID NO: 316 - DNA, 124 bp, Vaccinia virus; identical to SEQ ID NO: 2

SEQ ID NO: 317 - DNA, 122 bp, Vaccinia virus; identical to SEQ ID NO: 12

SEQ ID NO: 318 - DNA, 78 bp, Vaccinia virus
attaattataaaattatgtatatgatttactaactttagttagataagttagtaatacataaattttagtatattaat

SEQ ID NO: 319 - DNA, 100 bp, Vaccinia virus; identical to SEQ ID NO: 13

SEQ ID NO: 320 - DNA, 100 bp, Vaccinia virus; identical to SEQ ID NO: 13

SEQ ID NO: 321 - DNA, 100 bp, Vaccinia virus; identical to SEQ ID NO: 13

SEQ ID NO: 322 - DNA, 101 bp, Vaccinia virus; identical to SEQ ID NO: 15

SEQ ID NO: 323 - DNA, 115 bp, Vaccinia virus; identical to SEQ ID NO: 16

SEQ ID NO: 324 - DNA, 96 bp, Vaccinia virus; identical to SEQ ID NO: 17

SEQ ID NO: 325 - DNA, 130 bp, Vaccinia virus; identical to SEQ ID NO: 18

SEQ ID NO: 326 - DNA, 91 bp, Vaccinia virus; identical to SEQ ID NO: 20

SEQ ID NO: 327 - DNA, 96 bp, Vaccinia virus; identical to SEQ ID NO: 21

SEQ ID NO: 328 - DNA, 70 bp, Vaccinia virus; identical to SEQ ID NO: 22

SEQ ID NO: 329 - DNA, 70 bp, Vaccinia virus; identical to SEQ ID NO: 22

SEQ ID NO: 330 - DNA, 61 bp, Vaccinia virus; identical to SEQ ID NO: 24

SEQ ID NO: 331 - DNA, 128 bp, Vaccinia virus; identical to SEQ ID NO: 25

SEQ ID NO: 332 - DNA, 128 bp, Vaccinia virus; identical to SEQ ID NO: 25

SEQ ID NO: 333 - DNA, 128 bp, Vaccinia virus; identical to SEQ ID NO: 25

SEQ ID NO: 334 - DNA, 128 bp, Vaccinia virus; identical to SEQ ID NO: 25

SEQ ID NO: 335 - DNA, 128 bp, Vaccinia virus; identical to SEQ ID NO: 25

SEQ ID NO: 336 - DNA, 128 bp, Vaccinia virus; identical to SEQ ID NO: 25

SEQ ID NO: 337 - DNA, 128 bp, Vaccinia virus; identical to SEQ ID NO: 25

SEQ ID NO: 338 - DNA, 126 bp, Vaccinia virus; identical to SEQ ID NO: 31

SEQ ID NO: 339 - DNA, 71 bp, Vaccinia virus; identical to SEQ ID NO: 32

SEQ ID NO: 340 - DNA, 75 bp, Vaccinia virus; identical to SEQ ID NO: 33

SEQ ID NO: 341 - DNA, 119 bp, Vaccinia virus
tgagaccatcaaagagagaaagagaataaaaatatttttgtaaaactttttttatgagaccatcaaagagagaaagagaataaaaatatttttgtaaaactttttttatgagaccatca

SEQ ID NO: 342 - DNA, 131 bp, Vaccinia virus; identical to SEQ ID NO: 35

SEQ ID NO: 343 - DNA, 91 bp, Vaccinia virus; identical to SEQ ID NO: 36

SEQ ID NO: 344 - DNA, 107 bp, Vaccinia virus
tcaccttatcaaagtcgtttatatcacattgtatatagtttataaccttaactttcgaggttattggttgtggatcttctacaatatctatgactctgatttcttga

SEQ ID NO: 345 - DNA, 70 bp, Vaccinia virus
tcggccatacgtttactttttgcgtatacatgtcctggtgatatatcataaagggtatgctcatggccga

SEQ ID NO: 346 - DNA, 62 bp, Vaccinia virus; identical to SEQ ID NO: 55

SEQ ID NO: 347 - DNA, 63 bp, Vaccinia virus; identical to SEQ ID NO: 42

SEQ ID NO: 348 - DNA, 73 bp, Vaccinia virus; identical to SEQ ID NO: 43

SEQ ID NO: 349 - DNA, 102 bp, Vaccinia virus; identical to SEQ ID NO: 41

SEQ ID NO: 350 - DNA, 24 bp, Vaccinia virus
tgatggagtcgtaaaaaagtttta

SEQ ID NO: 351 - DNA, 24 bp, Vaccinia virus
tgatggagtcgtaaaaaagtttta

SEQ ID NO: 352 - DNA, 24 bp, Vaccinia virus
tgatggagtcgtaaaaaagtttta

SEQ ID NO: 353 - DNA, 24 bp, Vaccinia virus
tgatggagtcgtaaaaaagtttta

SEQ ID NO: 354 - DNA, 24 bp, Vaccinia virus
tgatggagtcgtaaaaaagtttta

SEQ ID NO: 355 - DNA, 24 bp, Vaccinia virus
tgatggagtcgtaaaaaagtttta

SEQ ID NO: 356 - DNA, 24 bp, Vaccinia virus
tgatggagtcgtaaaaaagtttta

SEQ ID NO: 357 - DNA, 24 bp, Vaccinia virus
tgatggagtcgtaaaaaagtttta

SEQ ID NO: 358 - DNA, 24 bp, Vaccinia virus
tgatggagtcgtaaaaaagtttta

SEQ ID NO: 359 - DNA, 24 bp, Vaccinia virus
tgatggagtcgtaaaaaagtttta

SEQ ID NO: 360 - DNA, 24 bp, Vaccinia virus
tgatggagtcgtaaaaaagtttta

SEQ ID NO: 361 - DNA, 24 bp, Vaccinia virus
cgtaaaaaagttttatctttctct

SEQ ID NO: 362 - DNA, 24 bp, Vaccinia virus
tgatggagtcgtaaaaaagtttta

SEQ ID NO: 363 - DNA, 24 bp, Vaccinia virus
tgatggagtcgtaaaaaagtttta

SEQ ID NO: 364 - DNA, 24 bp, Vaccinia virus
tgatggagtcgtaaaaaagtttta

SEQ ID NO: 365 - DNA, 24 bp, Vaccinia virus
ataaaaaaagttttacaaaaatat

SEQ ID NO: 366 - DNA, 24 bp, Vaccinia virus
taaaatatttttattctctttctc

SEQ ID NO: 367 - DNA, 24 bp, Vaccinia virus
tgatggagtcgtaaaaaagtttta

SEQ ID NO: 368 - DNA, 24 bp, Vaccinia virus
tgatggagtcgtaaaaaagtttta

SEQ ID NO: 369 - DNA, 24 bp, Vaccinia virus
tctttggtacaaaatttcacacaa

SEQ ID NO: 370 - DNA, 24 bp, Vaccinia virus
tgagaccatcgaaggagactccat

SEQ ID NO: 371 - DNA, 24 bp, Vaccinia virus
aatatttttgtaaaacttttttta

SEQ ID NO: 372 - DNA, 24 bp, Vaccinia virus
aatatttttgtaaaacttttttta

SEQ ID NO: 373 - DNA, 24 bp, Vaccinia virus
ttatacgatctacgttttattata

SEQ ID NO: 374 - DNA, 24 bp, Vaccinia virus
catcagaaagaggtttaatatttt

SEQ ID NO: 375 - DNA, 24 bp, Vaccinia virus
catcagaaagaggtttaatatttt

SEQ ID NO: 376 - DNA, 24 bp, Vaccinia virus
catcagaaagaggtttaatatttt

SEQ ID NO: 377 - DNA, 24 bp, Vaccinia virus
catcagaaagaggtttaatatttt

SEQ ID NO: 378 - DNA, 24 bp, Vaccinia virus
catcagaaagaggtttaatatttt

SEQ ID NO: 379 - DNA, 24 bp, Vaccinia virus
catcagaaagaggtttaatatttt

SEQ ID NO: 380 - DNA, 24 bp, Vaccinia virus
catcagaaagaggtttaatatttt

SEQ ID NO: 381 - DNA, 24 bp, Vaccinia virus
tgaatagagttatcgattcagaca

SEQ ID NO: 382 - DNA, 24 bp, Vaccinia virus
agaggtttaatatttttgtgagac

SEQ ID NO: 383 - DNA, 24 bp, Vaccinia virus
agagagaaagagaataaaaatatt

SEQ ID NO: 384 - DNA, 24 bp, Vaccinia virus
gaagagagaaagagaataaaaata

SEQ ID NO: 385 - DNA, 24 bp, Vaccinia virus
tcaatgttttaaaatatatggaca

SEQ ID NO: 386 - DNA, 24 bp, Vaccinia virus
atggttctttccgtacaacatact

SEQ ID NO: 387 - DNA, 24 bp, Vaccinia virus
tgactcgtcccttaataggcagta

SEQ ID NO: 388 - DNA, 24 bp, Vaccinia virus
gattgtatcagtttcgtagtcttg

SEQ ID NO: 389 - DNA, 24 bp, Vaccinia virus
taacatcgattcccatatgatgtt

SEQ ID NO: 390 - DNA, 24 bp, Vaccinia virus
tgattggagaagtaggaaacagga

SEQ ID NO: 391 - DNA, 24 bp, Vaccinia virus
tcgattccgtccaagatgataaaa

SEQ ID NO: 392 - DNA, 24 bp, Vaccinia virus
taatgtcctgtttcatttgtttcc

SEQ ID NO: 393 - DNA, 24 bp, Vaccinia virus
tgtatgctcctagcggagttaatc

SEQ ID NO: 394 - DNA, 24 bp, Vaccinia virus
tcatcgggtgtattctcattcata

SEQ ID NO: 395 - DNA, 24 bp, Vaccinia virus
ttctggtctcggattaggcgtcgt

SEQ ID NO: 396 - DNA, 24 bp, Vaccinia virus
atcgatcatatctatatcatccat

SEQ ID NO: 397 - DNA, 23 bp, Vaccinia virus
ttgaagactcttccagagacgat

SEQ ID NO: 398 - DNA, 24 bp, Vaccinia virus
ttaataatataaaattcccaatct

SEQ ID NO: 399 - DNA, 24 bp, Vaccinia virus
tggggttactctaaatcgcttgtt

SEQ ID NO: 400 - DNA, 24 bp, Vaccinia virus
ttagtagcgtggcaatgacagggt

SEQ ID NO: 401 - DNA, 24 bp, Vaccinia virus
ttaattgtaaatgatattattatt

SEQ ID NO: 402 - DNA, 24 bp, Vaccinia virus
agataacataccacaccatttttt

SEQ ID NO: 403 - DNA, 24 bp, Vaccinia virus
ataagtggacatatagatgcagaa

SEQ ID NO: 404 - DNA, 24 bp, Vaccinia virus
tgatacatgtattaaaatactttc

SEQ ID NO: 405 - DNA, 24 bp, Vaccinia virus
taaaaattaaacaaatcgttatta

SEQ ID NO: 406 - DNA, 23 bp, Vaccinia virus
atggattctgtgtttatgctgtt

SEQ ID NO: 407 - DNA, 24 bp, Vaccinia virus
taatataaactaataatatattgt

SEQ ID NO: 408 - DNA, 24 bp, Vaccinia virus
tctctagcgtggatacagtcaccg

SEQ ID NO: 409 - DNA, 24 bp, Vaccinia virus
tatcagtatgtatatctatattaa

SEQ ID NO: 410 - DNA, 24 bp, Vaccinia virus
tattatacaaaaattttttatttc

SEQ ID NO: 411 - DNA, 19 bp, Vaccinia virus
tataacatcgtaatcaaaa

SEQ ID NO: 412 - DNA, 24 bp, Vaccinia virus
atagttagatagaatattcattag

SEQ ID NO: 413 - DNA, 24 bp, Vaccinia virus
tggtatgttcacgataagtataat

SEQ ID NO: 414 - DNA, 24 bp, Vaccinia virus
tcttttaagaattgtggatattag

SEQ ID NO: 415 - DNA, 20 bp, Vaccinia virus
ttctcatcatcagaataaat

SEQ ID NO: 416 - DNA, 24 bp, Vaccinia virus
ccgctgagtggtaaacaacagaac

SEQ ID NO: 417 - DNA, 24 bp, Vaccinia virus
cgttagtttaatatcctcagtcat

SEQ ID NO: 418 - DNA, 24 bp, Vaccinia virus
ttgatgatatctacatcgtttgga

SEQ ID NO: 419 - DNA, 19 bp, Vaccinia virus
tagctttcactcatatgac

SEQ ID NO: 420 - DNA, 24 bp, Vaccinia virus
cagaagtaggattatgtaacatca

SEQ ID NO: 421 - DNA, 21 bp, Vaccinia virus
tatgaagtaaagtatctacga

SEQ ID NO: 422 - DNA, 24 bp, Vaccinia virus
ccgtttgcatgttaccactatcaa

SEQ ID NO: 423 - DNA, 24 bp, Vaccinia virus
gctacagttccttgttcgtcgaca

SEQ ID NO: 424 - DNA, 24 bp, Vaccinia virus
tgcattaatttttgtattgattct

SEQ ID NO: 425 - DNA, 24 bp, Vaccinia virus
tgttttgcgatagccatgtatcta

SEQ ID NO: 426 - DNA, 24 bp, Vaccinia virus
taagtttggcagctagcagattca

SEQ ID NO: 427 - DNA, 24 bp, Vaccinia virus
tcctcctaggatatttgtaatatc

SEQ ID NO: 428 - DNA, 24 bp, Vaccinia virus
tgagaatactaaaattcctaacga

SEQ ID NO: 429 - DNA, 24 bp, Vaccinia virus
taatagttaccacgtgctgtacca

SEQ ID NO: 430 - DNA, 24 bp, Vaccinia virus
tccatagtacatagttgttgcggt

SEQ ID NO: 431 - DNA, 24 bp, Vaccinia virus
tagtaggactagtatcgtacaatt

SEQ ID NO: 432 - DNA, 19 bp, Vaccinia virus
tttgtggtattggatagaa

SEQ ID NO: 433 - DNA, 24 bp, Vaccinia virus
tgacagaccagacctaggagctat

SEQ ID NO: 434 - DNA, 24 bp, Vaccinia virus
ttgaaattgttttttattttcttg

SEQ ID NO: 435 - DNA, 24 bp, Vaccinia virus
tccaaaatgatgcctctgcctttt

SEQ ID NO: 436 - DNA, 24 bp, Vaccinia virus
gtgaatccatctctatgtttcagt

SEQ ID NO: 437 - DNA, 24 bp, Vaccinia virus
gaagtgattctttgatggtgtcag

SEQ ID NO: 438 - DNA, 24 bp, Vaccinia virus
tttgttggattcctgattatttac

SEQ ID NO: 439 - DNA, 24 bp, Vaccinia virus
ggccaatagtagctattaccgtcg

SEQ ID NO: 440 - DNA, 24 bp, Vaccinia virus
ttatcccaattaccaactagaagt

SEQ ID NO: 441 - DNA, 24 bp, Vaccinia virus
ggaattggaggcgatgatcttaat

SEQ ID NO: 442 - DNA, 24 bp, Vaccinia virus
gcgctcccctagtcgtactcagag

SEQ ID NO: 443 - DNA, 24 bp, Vaccinia virus
ttagctgttttcatcaagatttgt

SEQ ID NO: 444 - DNA, 24 bp, Vaccinia virus
tattatttataactgatgtaaccc

SEQ ID NO: 445 - DNA, 24 bp, Vaccinia virus
acgcgtgtctaactagtggaggtt

SEQ ID NO: 446 - DNA, 24 bp, Vaccinia virus
cgaggaggaatatcgtcggagctg

SEQ ID NO: 447 - DNA, 17 bp, Vaccinia virus
tataccagaattaatgg

SEQ ID NO: 448 - DNA, 24 bp, Vaccinia virus
tgaattgattcttgaggtataaac

SEQ ID NO: 449 - DNA, 24 bp, Vaccinia virus
acgggaacagggtttgttgattcg

SEQ ID NO: 450 - DNA, 24 bp, Vaccinia virus
tgcacgtaatctattatagatgcc

SEQ ID NO: 451 - DNA, 24 bp, Vaccinia virus
ttcatatttattagataccgcatt

SEQ ID NO: 452 - DNA, 18 bp, Vaccinia virus
tatgatcctctctcattg

SEQ ID NO: 453 - DNA, 24 bp, Vaccinia virus
taggagagttactaggcccaactg

SEQ ID NO: 454 - DNA, 22 bp, Vaccinia virus
taagtcttccaagttggcatca

SEQ ID NO: 455 - DNA, 24 bp, Vaccinia virus
tagaatatactcaatagaatttgt

SEQ ID NO: 456 - DNA, 24 bp, Vaccinia virus
taagatatgggattttacttaata

SEQ ID NO: 457 - DNA, 24 bp, Vaccinia virus
tcaataacagttagtagtttagtt

SEQ ID NO: 458 - DNA, 24 bp, Vaccinia virus
taaagctatcgtcattgatcatcg

SEQ ID NO: 459 - DNA, 24 bp, Vaccinia virus
tcttattgtctgatttatttcttt

SEQ ID NO: 460 - DNA, 24 bp, Vaccinia virus
tgttacgaaaatcaatatattcag

SEQ ID NO: 461 - DNA, 22 bp, Vaccinia virus
ttagtcaatgctttaacgtaca

SEQ ID NO: 462 - DNA, 24 bp, Vaccinia virus
tccaaattgcagtttctggtatcc

SEQ ID NO: 463 - DNA, 24 bp, Vaccinia virus
taataagatgctaatacatcaggt

SEQ ID NO: 464 - DNA, 24 bp, Vaccinia virus
tgagttggctactatcttgtacgt

SEQ ID NO: 465 - DNA, 20 bp, Vaccinia virus
cggcatggtttctgtgacta

SEQ ID NO: 466 - DNA, 24 bp, Vaccinia virus
tgatggacagatgatacaaataag

SEQ ID NO: 467 - DNA, 24 bp, Vaccinia virus
cggtattttttatggcaaacttta

SEQ ID NO: 468 - DNA, 24 bp, Vaccinia virus
tatcataagcttgactacatttgg

SEQ ID NO: 469 - DNA, 24 bp, Vaccinia virus
tcaatgatttcatcaaccgttaga

SEQ ID NO: 470 - DNA, 24 bp, Vaccinia virus
catggctccgtttaatttgttgat

SEQ ID NO: 471 - DNA, 21 bp, Vaccinia virus
taactcggatctgctatatgg

SEQ ID NO: 472 - DNA, 24 bp, Vaccinia virus
tgactagataaactatcagtaagt

SEQ ID NO: 473 - DNA, 24 bp, Vaccinia virus
actatctttaatagaactcttttc

SEQ ID NO: 474 - DNA, 24 bp, Vaccinia virus
tatggtattaagaattcgtttttc

SEQ ID NO: 475 - DNA, 24 bp, Vaccinia virus
ttcctcggccattttaatatttaa

SEQ ID NO: 476 - DNA, 22 bp, Vaccinia virus
tttgataaagccttcctcgcaa

SEQ ID NO: 477 - DNA, 24 bp, Vaccinia virus
cgcctttatttccacattagatgg

SEQ ID NO: 478 - DNA, 21 bp, Vaccinia virus
acatatccgttacaatttgtt

SEQ ID NO: 479 - DNA, 24 bp, Vaccinia virus
tcaccacgtgtgtttcaggatcat

SEQ ID NO: 480 - DNA, 24 bp, Vaccinia virus
tgctatttcggctgccagagtgtc

SEQ ID NO: 481 - DNA, 24 bp, Vaccinia virus
taagatatgtttattcataaacgc

SEQ ID NO: 482 - DNA, 24 bp, Vaccinia virus
tctatgttcctcgtttcctgtatt

SEQ ID NO: 483 - DNA, 24 bp, Vaccinia virus
tatagtatctgaaatcatattcat

SEQ ID NO: 484 - DNA, 24 bp, Vaccinia virus
tcgttgatctctcatagatttaga

SEQ ID NO: 485 - DNA, 24 bp, Vaccinia virus
atgcatcggtaaatatagctgtat

SEQ ID NO: 486 - DNA, 24 bp, Vaccinia virus
ttccttcggcatttctttttaatg

SEQ ID NO: 487 - DNA, 24 bp, Vaccinia virus
taagataaactaaatctcgcaaag

SEQ ID NO: 488 - DNA, 24 bp, Vaccinia virus
tgaaatccaaggatttattaatgt

SEQ ID NO: 489 - DNA, 24 bp, Vaccinia virus
tagcaggacattgatgctctagac

SEQ ID NO: 490 - DNA, 24 bp, Vaccinia virus
tccactatatgtttctgtagcggc

SEQ ID NO: 491 - DNA, 24 bp, Vaccinia virus
ttccgcatattttaatgactcttc

SEQ ID NO: 492 - DNA, 24 bp, Vaccinia virus
gagctcaacacttactccgccacc

SEQ ID NO: 493 - DNA, 24 bp, Vaccinia virus
tgtggtagatttgttctatagagc

SEQ ID NO: 494 - DNA, 24 bp, Vaccinia virus
aacagtatcatttaaacatttaac

SEQ ID NO: 495 - DNA, 24 bp, Vaccinia virus
taatattgataaaatctccattct

SEQ ID NO: 496 - DNA, 24 bp, Vaccinia virus
tgagaatatccatcgtttgcttgg

SEQ ID NO: 497 - DNA, 21 bp, Vaccinia virus
tattaaagtcttctatttcta

SEQ ID NO: 498 - DNA, 24 bp, Vaccinia virus
attattcttatcatgcgtccatag

SEQ ID NO: 499 - DNA, 24 bp, Vaccinia virus
tttttagataaaaaatataatatt

SEQ ID NO: 500 - DNA, 24 bp, Vaccinia virus
taccgtgtgggatataaaagtcct

SEQ ID NO: 501 - DNA, 24 bp, Vaccinia virus
gtttactatttattgataacgcag

SEQ ID NO: 502 - DNA, 24 bp, Vaccinia virus
catgtgaaaatagtcatattcctg

SEQ ID NO: 503 - DNA, 20 bp, Vaccinia virus
tgaatacaacgaatacttca

SEQ ID NO: 504 - DNA, 24 bp, Vaccinia virus
ttaattggtttaatcgtttattaa

SEQ ID NO: 505 - DNA, 23 bp, Vaccinia virus
ttccacagagcactaatttccaa

SEQ ID NO: 506 - DNA, 24 bp, Vaccinia virus
ccgcagcacaatgaaccaacacgg

SEQ ID NO: 507 - DNA, 24 bp, Vaccinia virus
caatgtatatttatccatcgtcaa

SEQ ID NO: 508 - DNA, 24 bp, Vaccinia virus
tgaagagccgcgtttaacaatgct

SEQ ID NO: 509 - DNA, 24 bp, Vaccinia virus
ttgaatttactaatcttgcccttg

SEQ ID NO: 510 - DNA, 24 bp, Vaccinia virus
tccaatcgcatagctataaaatag

SEQ ID NO: 511 - DNA, 24 bp, Vaccinia virus
ttgatgttttggctgcttgtacgc

SEQ ID NO: 512 - DNA, 24 bp, Vaccinia virus
agttatattttcgtctatccattg

SEQ ID NO: 513 - DNA, 24 bp, Vaccinia virus
tctctgaatggatactagttttct

SEQ ID NO: 514 - DNA, 24 bp, Vaccinia virus
tgtgatggaaaaatgactaatttt

SEQ ID NO: 515 - DNA, 24 bp, Vaccinia virus
gataactgtatttttaatcacgtc

SEQ ID NO: 516 - DNA, 24 bp, Vaccinia virus
ttcatgtgaaactttgtcctttcc

SEQ ID NO: 517 - DNA, 24 bp, Vaccinia virus
tactcgatgcgtgagtcttgcatt

SEQ ID NO: 518 - DNA, 24 bp, Vaccinia virus
tcgatactgcagagattctagtaa

SEQ ID NO: 519 - DNA, 24 bp, Vaccinia virus
tggagaatttttttcagttgtttg

SEQ ID NO: 520 - DNA, 24 bp, Vaccinia virus
ttagttcatcatatggaacttttt

SEQ ID NO: 521 - DNA, 24 bp, Vaccinia virus
taagttattcatgacggtagcata

SEQ ID NO: 522 - DNA, 22 bp, Vaccinia virus
cactagtttagattcaacatac

SEQ ID NO: 523 - DNA, 24 bp, Vaccinia virus
tctatagcatctactaactgtaca

SEQ ID NO: 524 - DNA, 24 bp, Vaccinia virus
tgtaagctctttttgaaattgatg

SEQ ID NO: 525 - DNA, 24 bp, Vaccinia virus
atatcattgaccatttgtctggct

SEQ ID NO: 526 - DNA, 24 bp, Vaccinia virus
tgggaataaaatactactgttgag

SEQ ID NO: 527 - DNA, 24 bp, Vaccinia virus
tagcttctacagtctttcgtttcc

SEQ ID NO: 528 - DNA, 24 bp, Vaccinia virus
tgagaaaagtgtgttctgaatcgc

SEQ ID NO: 529 - DNA, 24 bp, Vaccinia virus
taggatatagtttcataataggaa

SEQ ID NO: 530 - DNA, 24 bp, Vaccinia virus
tattacacacggaacgtttataac

SEQ ID NO: 531 - DNA, 24 bp, Vaccinia virus
taacacgcttctgttctcatctat

SEQ ID NO: 532 - DNA, 24 bp, Vaccinia virus
aggcatttcgtaatatgatattct

SEQ ID NO: 533 - DNA, 24 bp, Vaccinia virus
tatagaaataatgataagtccatc

SEQ ID NO: 534 - DNA, 22 bp, Vaccinia virus
tactaggtagcaaattgtctag

SEQ ID NO: 535 - DNA, 24 bp, Vaccinia virus
ttcaatttatacggatttctatag

SEQ ID NO: 536 - DNA, 24 bp, Vaccinia virus
actcgtttatgacaccataggcat

SEQ ID NO: 537 - DNA, 24 bp, Vaccinia virus
tttctagttctaattatttcagaa

SEQ ID NO: 538 - DNA, 23 bp, Vaccinia virus
catcgtatactcgaccatctacg

SEQ ID NO: 539 - DNA, 24 bp, Vaccinia virus
tataaagtgcacgtttacatatct

SEQ ID NO: 540 - DNA, 21 bp, Vaccinia virus
tgagaagtctttttcattagc

SEQ ID NO: 541 - DNA, 24 bp, Vaccinia virus
ccgcactagcatcccctttcaata

SEQ ID NO: 542 - DNA, 21 bp, Vaccinia virus
tgatatacctgtttttatttc

SEQ ID NO: 543 - DNA, 24 bp, Vaccinia virus
taacgtatcgcattaatactgttt

SEQ ID NO: 544 - DNA, 24 bp, Vaccinia virus
actagacatttaccatgggatgct

SEQ ID NO: 545 - DNA, 24 bp, Vaccinia virus
tagattgttttcagtgagatgatt

SEQ ID NO: 546 - DNA, 24 bp, Vaccinia virus
acgcatattctactcttggaatta

SEQ ID NO: 547 - DNA, 18 bp, Vaccinia virus
ttcgtgttccaaacatta

SEQ ID NO: 548 - DNA, 24 bp, Vaccinia virus
tataatctttttcatcttgtgagt

SEQ ID NO: 549 - DNA, 24 bp, Vaccinia virus
cgttgtgtctacaaccgctacata

SEQ ID NO: 550 - DNA, 24 bp, Vaccinia virus
taggtgctgaaataaccacatctg

SEQ ID NO: 551 - DNA, 17 bp, Vaccinia virus
tacgtaaccgaatcttc

SEQ ID NO: 552 - DNA, 24 bp, Vaccinia virus
tagaaggagtgttttcttggcaaa

SEQ ID NO: 553 - DNA, 24 bp, Vaccinia virus
ggataatttaactactatattggc

SEQ ID NO: 554 - DNA, 24 bp, Vaccinia virus
tatttagtttattcataatgttaa

SEQ ID NO: 555 - DNA, 24 bp, Vaccinia virus
tgaaatagctcgtttctatttgtt

SEQ ID NO: 556 - DNA, 24 bp, Vaccinia virus
agataatatcctgaacagcattgc

SEQ ID NO: 557 - DNA, 24 bp, Vaccinia virus
tagtatagcgtcgtttaagagcag

SEQ ID NO: 558 - DNA, 24 bp, Vaccinia virus
ttgaagtttccaaattttgataat

SEQ ID NO: 559 - DNA, 23 bp, Vaccinia virus
ttctttgtattttggcatatcct

SEQ ID NO: 560 - DNA, 24 bp, Vaccinia virus
tagtatttttctaacgtcggtatt

SEQ ID NO: 561 - DNA, 24 bp, Vaccinia virus
aattttagaaataacattagcgaa

SEQ ID NO: 562 - DNA, 24 bp, Vaccinia virus
tggctacaaacttttccttttcca

SEQ ID NO: 563 - DNA, 24 bp, Vaccinia virus
tttccggctgttgtatatttaaat

SEQ ID NO: 564 - DNA, 24 bp, Vaccinia virus
tagcatcgctttgagattctccat

SEQ ID NO: 565 - DNA, 24 bp, Vaccinia virus
ttcctctggagatgacactacggc

SEQ ID NO: 566 - DNA, 24 bp, Vaccinia virus
tattgtttaatcgttttatagatt

SEQ ID NO: 567 - DNA, 23 bp, Vaccinia virus
ggaggtggagtatcgtcaataat

SEQ ID NO: 568 - DNA, 24 bp, Vaccinia virus
tatcagatgattttgtattagatc

SEQ ID NO: 569 - DNA, 24 bp, Vaccinia virus
actacctttgtcacccaactttat

SEQ ID NO: 570 - DNA, 24 bp, Vaccinia virus
tgaagtaattaatttttctgcctc

SEQ ID NO: 571 - DNA, 24 bp, Vaccinia virus
attcacgtgacgtggtatcaatta

SEQ ID NO: 572 - DNA, 24 bp, Vaccinia virus
tacaattagacgtaagttctgctt

SEQ ID NO: 573 - DNA, 24 bp, Vaccinia virus
tacatgtaatacattttgaactct

SEQ ID NO: 574 - DNA, 24 bp, Vaccinia virus
tcgaaaacaaaaatagatattatt

SEQ ID NO: 575 - DNA, 24 bp, Vaccinia virus
tgtatagaggacgttttgattcga

SEQ ID NO: 576 - DNA, 24 bp, Vaccinia virus
tttatctacagacagactaataat

SEQ ID NO: 577 - DNA, 24 bp, Vaccinia virus
tttgtacagactaagtaattcttt

SEQ ID NO: 578 - DNA, 22 bp, Vaccinia virus
aacatctttgaaatctttactt

SEQ ID NO: 579 - DNA, 23 bp, Vaccinia virus
tatccagagatatcttgtaatgg

SEQ ID NO: 580 - DNA, 24 bp, Vaccinia virus
tacttctttaaagtactcgttttg

SEQ ID NO: 581 - DNA, 24 bp, Vaccinia virus
tctaaattcggcaggaaagtcaca

SEQ ID NO: 582 - DNA, 23 bp, Vaccinia virus
ataaatttataatgttcgccatt

SEQ ID NO: 583 - DNA, 24 bp, Vaccinia virus
tccctaataacttcgtgaataatg

SEQ ID NO: 584 - DNA, 24 bp, Vaccinia virus
gtttcagcgtgattttccaaccta

SEQ ID NO: 585 - DNA, 24 bp, Vaccinia virus
tagcctctggctttttatcagcct

SEQ ID NO: 586 - DNA, 24 bp, Vaccinia virus
tgagatcaactttatctaatggtt

SEQ ID NO: 587 - DNA, 24 bp, Vaccinia virus
tggaatagttttttactagtaaag

SEQ ID NO: 588 - DNA, 24 bp, Vaccinia virus
gatgccatgttaaaaatgtccgcc

SEQ ID NO: 589 - DNA, 24 bp, Vaccinia virus
agcatcatctttagatcattaatt

SEQ ID NO: 590 - DNA, 24 bp, Vaccinia virus
taaaatacaaatgacattccctta

SEQ ID NO: 591 - DNA, 24 bp, Vaccinia virus
acactgataaaccgcattatctgt

SEQ ID NO: 592 - DNA, 24 bp, Vaccinia virus
tttattgggtagtgttgatgattc

SEQ ID NO: 593 - DNA, 24 bp, Vaccinia virus
taactagtgtagaaaacagagata

SEQ ID NO: 594 - DNA, 24 bp, Vaccinia virus
atattatctacgtcattgttttgt

SEQ ID NO: 595 - DNA, 24 bp, Vaccinia virus
tattatactcatgcctagtaatag

SEQ ID NO: 596 - DNA, 23 bp, Vaccinia virus
aacgatgttaccaatcgtttgct

SEQ ID NO: 597 - DNA, 24 bp, Vaccinia virus
agtgaaaagaatgtaaactttgtc

SEQ ID NO: 598 - DNA, 24 bp, Vaccinia virus
ttaggtttgttcattgtcgtgtgg

SEQ ID NO: 599 - DNA, 24 bp, Vaccinia virus
tatagtgtaacacgaatgcagttt

SEQ ID NO: 600 - DNA, 24 bp, Vaccinia virus
tttatctattgatggtgtatgaac

SEQ ID NO: 601 - DNA, 24 bp, Vaccinia virus
taaaatgctaatgtcaagtttatt

SEQ ID NO: 602 - DNA, 24 bp, Vaccinia virus
ttccgtagtccatggatccaaact

SEQ ID NO: 603 - DNA, 24 bp, Vaccinia virus
aagagttttagttgtctagtattt

SEQ ID NO: 604 - DNA, 24 bp, Vaccinia virus
tgaatggatttatcatcatcgttt

SEQ ID NO: 605 - DNA, 24 bp, Vaccinia virus
gatgaccatatatttattttcagt

SEQ ID NO: 606 - DNA, 24 bp, Vaccinia virus
taaggtgattggaatgggataaat

SEQ ID NO: 607 - DNA, 24 bp, Vaccinia virus
acgtcatttaataaaaaaagtatt

SEQ ID NO: 608 - DNA, 24 bp, Vaccinia virus
tggcaataactaattgagatattg

SEQ ID NO: 609 - DNA, 24 bp, Vaccinia virus
gatatgataacaggaataacatct

SEQ ID NO: 610 - DNA, 24 bp, Vaccinia virus
cgtccatattttattctgaggcct

SEQ ID NO: 611 - DNA, 24 bp, Vaccinia virus
tatggcaaatctgcaatcactgta

SEQ ID NO: 612 - DNA, 24 bp, Vaccinia virus
caccgtaaatttatcaccagaaat

SEQ ID NO: 613 - DNA, 24 bp, Vaccinia virus
taaggtactttttctcataataaa

SEQ ID NO: 614 - DNA, 24 bp, Vaccinia virus
tttgttctatcaactacctataaa

SEQ ID NO: 615 - DNA, 24 bp, Vaccinia virus
atccaatttgtaaaaaatcagcgg

SEQ ID NO: 616 - DNA, 24 bp, Vaccinia virus
tcatttcccatgtattttttttat

SEQ ID NO: 617 - DNA, 24 bp, Vaccinia virus
tggaattgggctccttataccaag

SEQ ID NO: 618 - DNA, 24 bp, Vaccinia virus
tatcaaatgatcctgttgggcatt

SEQ ID NO: 619 - DNA, 24 bp, Vaccinia virus
ttaataattacttatcttttgacg

SEQ ID NO: 620 - DNA, 24 bp, Vaccinia virus
tattattattggctctgatcaccg

SEQ ID NO: 621 - DNA, 24 bp, Vaccinia virus
tgtaaaatttttgtcgataaaaat

SEQ ID NO: 622 - DNA, 24 bp, Vaccinia virus
tcgtacccaccgagagcgtgtgcg

SEQ ID NO: 623 - DNA, 18 bp, Vaccinia virus
ttcgttgtatatagtacg

SEQ ID NO: 624 - DNA, 24 bp, Vaccinia virus
taacggagattaaaaatatgacgc

SEQ ID NO: 625 - DNA, 24 bp, Vaccinia virus
gttgttgtttgcgactgcttccga

SEQ ID NO: 626 - DNA, 24 bp, Vaccinia virus
tgtgacacccattcatctggagaa

SEQ ID NO: 627 - DNA, 24 bp, Vaccinia virus
tcttttaccaacacaaagggtgga

SEQ ID NO: 628 - DNA, 24 bp, Vaccinia virus
tgaggctacctcgacatacgtgtg

SEQ ID NO: 629 - DNA, 24 bp, Vaccinia virus
taacatgttacagaatataaatta

SEQ ID NO: 630 - DNA, 24 bp, Vaccinia virus
tgagatattctgagcgctaacctt

SEQ ID NO: 631 - DNA, 24 bp, Vaccinia virus
tgtacaaattgatatggtcgtcgt

SEQ ID NO: 632 - DNA, 24 bp, Vaccinia virus
catggagtagatgatagaggggaa

SEQ ID NO: 633 - DNA, 24 bp, Vaccinia virus
aagttggctgtcatcttaccaatt

SEQ ID NO: 634 - DNA, 24 bp, Vaccinia virus
aattatagatacgctattaattat

SEQ ID NO: 635 - DNA, 22 bp, Vaccinia virus
ttagatatccgtaacactacca

SEQ ID NO: 636 - DNA, 24 bp, Vaccinia virus
tggtaagattactggctcgttttc

SEQ ID NO: 637 - DNA, 24 bp, Vaccinia virus
aagaatttatataaatcattccat

SEQ ID NO: 638 - DNA, 24 bp, Vaccinia virus
tgtatgctcctagcggagttaatc

SEQ ID NO: 639 - DNA, 24 bp, Vaccinia virus
tcagtaataataattcagtaatgt

SEQ ID NO: 640 - DNA, 24 bp, Vaccinia virus
tctacatttatatgttctctatcg

SEQ ID NO: 641 - DNA, 24 bp, Vaccinia virus
tacaaatagcagtgtagtgcagta

SEQ ID NO: 642 - DNA, 24 bp, Vaccinia virus
attgtcccacggaagtgaatcctt

SEQ ID NO: 643 - DNA, 24 bp, Vaccinia virus
tgagaaagaccagtagtattggat

SEQ ID NO: 644 - DNA, 19 bp, Vaccinia virus
tagtttatcatataccttt

SEQ ID NO: 645 - DNA, 24 bp, Vaccinia virus
ttctggtctcggattaggcgtcgt

SEQ ID NO: 646 - DNA, 24 bp, Vaccinia virus
ccttttttatcgttatcggttttc

SEQ ID NO: 647 - DNA, 24 bp, Vaccinia virus
tagaatatattttaaaggacttat

SEQ ID NO: 648 - DNA, 22 bp, Vaccinia virus
tctatgggtccatctatgagaa

SEQ ID NO: 649 - DNA, 24 bp, Vaccinia virus
ataagtggacatatagatgcagaa

SEQ ID NO: 650 - DNA, 24 bp, Vaccinia virus
tgtctaaatgtaattatgatcttg

SEQ ID NO: 651 - DNA, 24 bp, Vaccinia virus
atggttctttccgtacaacatact

SEQ ID NO: 652 - DNA, 24 bp, Vaccinia virus
tgactcgtcccttaataggcagta

SEQ ID NO: 653 - DNA, 24 bp, Vaccinia virus
gattgtatcagtttcgtagtcttg

SEQ ID NO: 654 - DNA, 24 bp, Vaccinia virus
taacatcgattcccatatgatgtt

SEQ ID NO: 655 - DNA, 24 bp, Vaccinia virus
tgatggagtcgtaaaaaagtttta

SEQ ID NO: 656 - DNA, 24 bp, Vaccinia virus
tgatggagtcgtaaaaaagtttta

SEQ ID NO: 657 - DNA, 24 bp, Vaccinia virus
tgatggagtcgtaaaaaagtttta

SEQ ID NO: 658 - DNA, 24 bp, Vaccinia virus
tgatggagtcgtaaaaaagtttta

SEQ ID NO: 659 - DNA, 24 bp, Vaccinia virus
tgatggagtcgtaaaaaagtttta

SEQ ID NO: 660 - DNA, 24 bp, Vaccinia virus
tgatggagtcgtaaaaaagtttta

SEQ ID NO: 661 - DNA, 24 bp, Vaccinia virus
tgatggagtcgtaaaaaagtttta

SEQ ID NO: 662 - DNA, 24 bp, Vaccinia virus
tgatggagtcgtaaaaaagtttta

SEQ ID NO: 663 - DNA, 24 bp, Vaccinia virus
tgatggagtcgtaaaaaagtttta

SEQ ID NO: 664 - DNA, 24 bp, Vaccinia virus
tgatggagtcgtaaaaaagtttta

SEQ ID NO: 665 - DNA, 24 bp, Vaccinia virus
tgatggagtcgtaaaaaagtttta

SEQ ID NO: 666 - DNA, 24 bp, Vaccinia virus
cgtaaaaaagttttatctttctct

SEQ ID NO: 667 - DNA, 24 bp, Vaccinia virus
taagttagtaatacataaatttta

SEQ ID NO: 668 - DNA, 24 bp, Vaccinia virus
tgatggagtcgtaaaaaagtttta

SEQ ID NO: 669 - DNA, 24 bp, Vaccinia virus
tgatggagtcgtaaaaaagtttta

SEQ ID NO: 670 - DNA, 24 bp, Vaccinia virus
tgatggagtcgtaaaaaagtttta

SEQ ID NO: 671 - DNA, 24 bp, Vaccinia virus
tgatggagtcgtaaaaaagtttta

SEQ ID NO: 672 - DNA, 24 bp, Vaccinia virus
ataaaaaaagttttacaaaaatat

SEQ ID NO: 673 - DNA, 24 bp, Vaccinia virus
taaaatatttttattctctttctc

SEQ ID NO: 674 - DNA, 24 bp, Vaccinia virus
tgatggagtcgtaaaaaagtttta

SEQ ID NO: 675 - DNA, 24 bp, Vaccinia virus
tctttggtacaaaatttcacacaa

SEQ ID NO: 676 - DNA, 24 bp, Vaccinia virus
tgagaccatcgaaggagactccat

SEQ ID NO: 677 - DNA, 24 bp, Vaccinia virus
aatatttttgtaaaacttttttta

SEQ ID NO: 678 - DNA, 24 bp, Vaccinia virus
aatatttttgtaaaacttttttta

SEQ ID NO: 679 - DNA, 24 bp, Vaccinia virus
ttatacgatctacgttttattata

SEQ ID NO: 680 - DNA, 24 bp, Vaccinia virus
catcagaaagaggtttaatatttt

SEQ ID NO: 681 - DNA, 24 bp, Vaccinia virus
catcagaaagaggtttaatatttt

SEQ ID NO: 682 - DNA, 24 bp, Vaccinia virus
catcagaaagaggtttaatatttt

SEQ ID NO: 683 - DNA, 24 bp, Vaccinia virus
catcagaaagaggtttaatatttt

SEQ ID NO: 684 - DNA, 24 bp, Vaccinia virus
catcagaaagaggtttaatatttt

SEQ ID NO: 685 - DNA, 24 bp, Vaccinia virus
catcagaaagaggtttaatatttt

SEQ ID NO: 686 - DNA, 24 bp, Vaccinia virus
catcagaaagaggtttaatatttt

SEQ ID NO: 687 - DNA, 24 bp, Vaccinia virus
catcagaaagaggtttaatatttt

SEQ ID NO: 688 - DNA, 24 bp, Vaccinia virus
tgaatagagttatcgattcagaca

SEQ ID NO: 689 - DNA, 24 bp, Vaccinia virus
agaggtttaatatttttgtgagac

SEQ ID NO: 690 - DNA, 24 bp, Vaccinia virus
agagagaaagagaataaaaatatt

SEQ ID NO: 691 - DNA, 24 bp, Vaccinia virus
gaagagagaaagagaataaaaata

SEQ ID NO: 692 - DNA, 24 bp, Vaccinia virus
tcaatgttttaaaatatatggaca

SEQ ID NO: 693 - DNA, 24 bp, Vaccinia virus
ttggttgtggatcttctacaatat

SEQ ID NO: 694 - DNA, 24 bp, Vaccinia virus
tatcataaagggtatgctcatggc

SEQ ID NO: 695 - DNA, 24 bp, Vaccinia virus
tgatacatgtattaaaatactttc

SEQ ID NO: 696 - DNA, 24 bp, Vaccinia virus
tcgattccgtccaagatgataaaa

SEQ ID NO: 697 - DNA, 24 bp, Vaccinia virus
taatgtcctgtttcatttgtttcc

SEQ ID NO: 698 - DNA, 24 bp, Vaccinia virus
tgattggagaagtaggaaacagga

SEQ ID NO: 699 - DNA, 21 bp, Vaccinia virus
cagccccagctgctcctcctc

SEQ ID NO: 700 - DNA, 19 bp, Vaccinia virus
taacttggcaaaagactta

SEQ ID NO: 701 - DNA, 18 bp, Vaccinia virus
ttattattgatgataaga

SEQ ID NO: 702 - DNA, 24 bp, Vaccinia virus
acttctgtatagtttatttagtca

SEQ ID NO: 703 - DNA, 17 bp, Vaccinia virus
tattttattctttcttc

SEQ ID NO: 704 - DNA, 18 bp, Vaccinia virus
cggaaacagacaagcaac

SEQ ID NO: 705 - DNA, 23 bp, Vaccinia virus
aaaaagcagaggccaagagtttg

SEQ ID NO: 706 - DNA, 21 bp, Vaccinia virus
atacgcaaacacaccgatgca

SEQ ID NO: 707 - DNA, 18 bp, Vaccinia virus
aaaggcaaatcatttgga

SEQ ID NO: 708 - DNA, 18 bp, Vaccinia virus
aatggagagaatacaata

SEQ ID NO: 709 - DNA, 18 bp, Vaccinia virus
gcgtgtgtgtagacacac

SEQ ID NO: 710 - DNA, 23 bp, Vaccinia virus
agaaaataagtatccatcagaga

SEQ ID NO: 711 - DNA, 19 bp, Vaccinia virus
catttcacaaatgtttagt

SEQ ID NO: 712 - DNA, 21 bp, Vaccinia virus
accctgtcattacgtcaacgc

SEQ ID NO: 713 - DNA, 16 bp, Vaccinia virus
cccctccatctgttcc

SEQ ID NO: 714 - DNA, 21 bp, Vaccinia virus
tctgctgctctgccactcagc

SEQ ID NO: 715 - DNA, 18 bp, Vaccinia virus
aagtagtggattcaaaga

SEQ ID NO: 716 - DNA, 21 bp, Vaccinia virus
gacaaagtaattcctctcact

SEQ ID NO: 717 - DNA, 17 bp, Vaccinia virus
ttctatcctacaacaag

SEQ ID NO: 718 - DNA, 18 bp, Vaccinia virus
cctctcattccagaggaa

SEQ ID NO: 719 - DNA, 22 bp, Vaccinia virus
gacaaagttttgctcttgtcac

SEQ ID NO: 720 - DNA, 22 bp, Vaccinia virus
tgaagcatttactttgtgttca

SEQ ID NO: 721 - DNA, 20 bp, Vaccinia virus
ttctattttacaactacaaa

SEQ ID NO: 722 - DNA, 21 bp, Vaccinia virus
aatgtttatgataataaaggc

SEQ ID NO: 723 - DNA, 16 bp, Vaccinia virus
tgaagtattgtgttta

SEQ ID NO: 724 - DNA, 22 bp, Vaccinia virus
tctaaatcaccagagaccaaac

SEQ ID NO: 725 - DNA, 19 bp, Vaccinia virus
aggccctaaaaagccagag

SEQ ID NO: 726 - DNA, 16 bp, Vaccinia virus
agggggaagactttaa

SEQ ID NO: 727 - DNA, 24 bp, Vaccinia virus
aagcaaaatactaatctaattgtg

SEQ ID NO: 728 - DNA, 19 bp, Vaccinia virus
catataaatgtggaggcta

SEQ ID NO: 729 - DNA, 19 bp, Vaccinia virus
caggtaccaggtagcccca

SEQ ID NO: 730 - DNA, 18 bp, Vaccinia virus
tcccttctcatctcccca

SEQ ID NO: 731 - DNA, 21 bp, Vaccinia virus
taagggaaccgtctgttttta

SEQ ID NO: 732 - DNA, 19 bp, Vaccinia virus
atgatcctaaaaataaccg

SEQ ID NO: 733 - DNA, 16 bp, Vaccinia virus
cctgctctctccagag

SEQ ID NO: 734 - DNA, 21 bp, Vaccinia virus
ggtggcctaagagttgagctc

SEQ ID NO: 735 - DNA, 20 bp, Vaccinia virus
aagtccttccaattatattt

SEQ ID NO: 736 - DNA, 24 bp, Vaccinia virus
tcctactttgcttctctccaccca

SEQ ID NO: 737 - DNA, 18 bp, Vaccinia virus
gagaagagaagcgtgtta

SEQ ID NO: 738 - DNA, 17 bp, Vaccinia virus
gcaggtgcttcaggata

SEQ ID NO: 739 - DNA, 24 bp, Vaccinia virus
tccaccctatatgtagtataaaga

SEQ ID NO: 740 - DNA, 22 bp, Vaccinia virus
ttcccctccactcagaaacccc

SEQ ID NO: 741 - DNA, 22 bp, Vaccinia virus
tgtgacttccaagtagaattta

SEQ ID NO: 742 - DNA, 18 bp, Vaccinia virus
ttctgtgtcataccacaa

SEQ ID NO: 743 - DNA, 20 bp, Vaccinia virus
gaaaatatgatgtttcacat

SEQ ID NO: 744 - DNA, 20 bp, Vaccinia virus
gtcataggatttgaaagctg

SEQ ID NO: 745 - DNA, 17 bp, Vaccinia virus
ccagtattaaattatcc

SEQ ID NO: 746 - DNA, 16 bp, Vaccinia virus
ttctttccaccacaaa

SEQ ID NO: 747 - DNA, 23 bp, Vaccinia virus
aaaactctcctacacttccatta

SEQ ID NO: 748 - DNA, 18 bp, Vaccinia virus
ttttgtggctttctttct

SEQ ID NO: 749 - DNA, 24 bp, Vaccinia virus
aaaaaatggtgtctatgaatttct

SEQ ID NO: 750 - DNA, 22 bp, Vaccinia virus
aaaggaaaggcatcactatgga

SEQ ID NO: 751 - DNA, 20 bp, Vaccinia virus
atcacgtcagtaaaatacta

SEQ ID NO: 752 - DNA, 22 bp, Vaccinia virus
agctcctaggccagggcctgtc

SEQ ID NO: 753 - DNA, 19 bp, Vaccinia virus
tattcctttttctctcctc

SEQ ID NO: 754 - DNA, 20 bp, Vaccinia virus
tctagagcatggagcctcta

SEQ ID NO: 755 - DNA, 18 bp, Vaccinia virus
agcccaccatttctcctc

SEQ ID NO: 756 - DNA, 18 bp, Vaccinia virus
tattccttatttctcttt

SEQ ID NO: 757 - DNA, 22 bp, Vaccinia virus
aggcaaaaaaattaaattattt

SEQ ID NO: 758 - DNA, 22 bp, Vaccinia virus
aggctggtgacaggccaaaggc

SEQ ID NO: 759 - DNA, 18 bp, Vaccinia virus
ccgcagcgcgcggaggaa

SEQ ID NO: 760 - DNA, 18 bp, Vaccinia virus
aatgacatttgtatttta

SEQ ID NO: 761 - DNA, 16 bp, Vaccinia virus
cctgatgcaaattgga

SEQ ID NO: 762 - DNA, 20 bp, Vaccinia virus
tatactacagcagaatgact

SEQ ID NO: 763 - DNA, 18 bp, Vaccinia virus
tgtggcatttgtaccaaa

SEQ ID NO: 764 - DNA, 22 bp, Vaccinia virus
tctcaaatgaaaaagtcttcga

SEQ ID NO: 765 - DNA, 23 bp, Vaccinia virus
cagccccggccggcgcctcctcg

SEQ ID NO: 766 - DNA, 21 bp, Vaccinia virus
tccatatactttggggacttg

SEQ ID NO: 767 - DNA, 18 bp, Vaccinia virus
gctgaaaactgcaacttg

SEQ ID NO: 768 - DNA, 18 bp, Vaccinia virus
ggcaataaatgttgagcc

SEQ ID NO: 769 - DNA, 21 bp, Vaccinia virus
aggcatgattaaaatatggac

SEQ ID NO: 770 - DNA, 23 bp, Vaccinia virus
ataaagccaggtacacgaggcag

SEQ ID NO: 771 - DNA, 20 bp, Vaccinia virus
gtgggtcatcccagcacctg

SEQ ID NO: 772 - DNA, 18 bp, Vaccinia virus
ttacttagcatgcacaaa

SEQ ID NO: 773 - DNA, 19 bp, Vaccinia virus
tggagaggaagaaacgcta

SEQ ID NO: 774 - DNA, 22 bp, Vaccinia virus
attaactccgtttccaaataca

SEQ ID NO: 775 - DNA, 18 bp, Vaccinia virus
gtgtgtttacctaaacta

SEQ ID NO: 776 - DNA, 20 bp, Vaccinia virus
tgatgtaggacttggaaaac

SEQ ID NO: 777 - DNA, 22 bp, Vaccinia virus
ggcttagtaatagatcacggca

SEQ ID NO: 778 - DNA, 18 bp, Vaccinia virus
ctgcaccctgccacttgt

SEQ ID NO: 779 - DNA, 19 bp, Vaccinia virus
cagtgccaaaaacaacaac

SEQ ID NO: 780 - DNA, 22 bp, Vaccinia virus
agaaagagaaatgaaatatttt

SEQ ID NO: 781 - DNA, 22 bp, Vaccinia virus
tatttttgctctccctcccttc

SEQ ID NO: 782 - DNA, 18 bp, Vaccinia virus
agaacatcctccaattcc

SEQ ID NO: 783 - DNA, 23 bp, Vaccinia virus
agagaaagtctgacttgccccac

SEQ ID NO: 784 - DNA, 19 bp, Vaccinia virus
gaaattaatctctggggaa

SEQ ID NO: 785 - DNA, 19 bp, Vaccinia virus
aaaaaaagttacagaaata

SEQ ID NO: 786 - DNA, 22 bp, Vaccinia virus
cagaaatggacattttcatatg

SEQ ID NO: 787 - DNA, 21 bp, Vaccinia virus
ttgaaaattccgtctgtggga

SEQ ID NO: 788 - DNA, 21 bp, Vaccinia virus
ttcccctttccccactccctg

SEQ ID NO: 789 - DNA, 18 bp, Vaccinia virus
gtaatagctctatcagcc

SEQ ID NO: 790 - DNA, 24 bp, Vaccinia virus
ctatagagtattccataatttgaa

SEQ ID NO: 791 - DNA, 21 bp, Vaccinia virus
cccctctaccaagccactcca

SEQ ID NO: 792 - DNA, 18 bp, Vaccinia virus
ttcacaagccattaggga

SEQ ID NO: 793 - DNA, 20 bp, Vaccinia virus
acctgaactattagcacgtc

SEQ ID NO: 794 - DNA, 21 bp, Vaccinia virus
tggaaaagaatccctgcagcc

SEQ ID NO: 795 - DNA, 24 bp, Vaccinia virus
tgtctgttgaccaatctctattca

SEQ ID NO: 796 - DNA, 18 bp, Vaccinia virus
agcaataaaagcgtgtta

SEQ ID NO: 797 - DNA, 19 bp, Vaccinia virus
atgccacccttttggaagc

SEQ ID NO: 798 - DNA, 18 bp, Vaccinia virus
acactctgagaaagagca

SEQ ID NO: 799 - DNA, 17 bp, Vaccinia virus
tgcaaatcctacccctg

SEQ ID NO: 800 - DNA, 19 bp, Vaccinia virus
aagcaaagatttcagtaga

SEQ ID NO: 801 - DNA, 18 bp, Vaccinia virus
gtggtcatttcagcccta

SEQ ID NO: 802 - DNA, 18 bp, Vaccinia virus
agccacagaagctgtgcc

SEQ ID NO: 803 - DNA, 17 bp, Vaccinia virus
gtcaggattgaaagctg

SEQ ID NO: 804 - DNA, 24 bp, Vaccinia virus
actgaaacatgcttaccagattca

SEQ ID NO: 805 - DNA, 19 bp, Vaccinia virus
ctaaatctgaggaatcaac

SEQ ID NO: 806 - DNA, 20 bp, Vaccinia virus
ttagcatttgctaccaagta

SEQ ID NO: 807 - DNA, 19 bp, Vaccinia virus
tgtattctgtaacagatta

SEQ ID NO: 808 - DNA, 20 bp, Vaccinia virus
gaaacgaaagaaagcaaagc

SEQ ID NO: 809 - DNA, 19 bp, Vaccinia virus
tatgctgacagaagaacca

SEQ ID NO: 810 - DNA, 23 bp, Vaccinia virus
gaaacaaaatcctcaggaaatta

SEQ ID NO: 811 - DNA, 17 bp, Vaccinia virus
ggactctctcacacagg

SEQ ID NO: 812 - DNA, 18 bp, Vaccinia virus
ggatgaatggatgtccca

SEQ ID NO: 813 - DNA, 30 bp, Vaccinia virus
atattttttctgatcccccactctctcttc

SEQ ID NO: 814 - DNA, 17 bp, Vaccinia virus
agtgttacactgtttga

SEQ ID NO: 815 - DNA, 22 bp, Vaccinia virus
taaaggtatgtgctatgataaa

SEQ ID NO: 816 - DNA, 18 bp, Vaccinia virus
gagggtatttgtagttta

SEQ ID NO: 817 - DNA, 21 bp, Vaccinia virus
taatttatattctttccatgt

SEQ ID NO: 818 - DNA, 21 bp, Vaccinia virus
gagaaagggcaaattatttta

SEQ ID NO: 819 - DNA, 21 bp, Vaccinia virus
tattgaaaaaagatgacctgc

SEQ ID NO: 820 - DNA, 21 bp, Vaccinia virus
tattgagatgacactaggtgc

SEQ ID NO: 821 - DNA, 23 bp, Vaccinia virus
ggtagcgtgcacggtgttgaact

SEQ ID NO: 822 - DNA, 23 bp, Vaccinia virus
aatattttcgtgtctgtctctct

SEQ ID NO: 823 - DNA, 17 bp, Vaccinia virus
gaaattggctggtggaa

SEQ ID NO: 824 - DNA, 17 bp, Vaccinia virus
agaactgaagactttaa

SEQ ID NO: 825 - DNA, 16 bp, Vaccinia virus
tccccagtggtgggtg

SEQ ID NO: 826 - DNA, 18 bp, Vaccinia virus
ggaaaggacaaagccaca

SEQ ID NO: 827 - DNA, 19 bp, Vaccinia virus
aagcagaggcagtctattg

SEQ ID NO: 828 - DNA, 20 bp, Vaccinia virus
tttatcataaacattttaca

SEQ ID NO: 829 - DNA, 19 bp, Vaccinia virus
ttctcatacctgcccacag

SEQ ID NO: 830 - DNA, 22 bp, Vaccinia virus
taatttatattctgctctaata

SEQ ID NO: 831 - DNA, 22 bp, Vaccinia virus
tctcgggatgaaacggaatcga

SEQ ID NO: 832 - DNA, 18 bp, Vaccinia virus
ttttcctctctttctctt

SEQ ID NO: 833 - DNA, 22 bp, Vaccinia virus
aattgtacaatacttgcattcc

SEQ ID NO: 834 - DNA, 20 bp, Vaccinia virus
aggactttcacaccataagg

SEQ ID NO: 835 - DNA, 17 bp, Vaccinia virus
tctactaaaactacaaa

SEQ ID NO: 836 - DNA, 20 bp, Vaccinia virus
tctaaatgttgaaagatcaa

SEQ ID NO: 837 - DNA, 16 bp, Vaccinia virus
agggggaagactttaa

SEQ ID NO: 838 - DNA, 23 bp, Vaccinia virus
ccatcatttggaaaaataaaggc

SEQ ID NO: 839 - DNA, 18 bp, Vaccinia virus
tgtgaatgtcctgtggaa

SEQ ID NO: 840 - DNA, 18 bp, Vaccinia virus
atttttgttactctcttc

SEQ ID NO: 841 - DNA, 24 bp, Vaccinia virus
gttcatacttctccaataaataaa

SEQ ID NO: 842 - DNA, 19 bp, Vaccinia virus
acttacttatttttatcta

SEQ ID NO: 843 - DNA, 19 bp, Vaccinia virus
aggactttctcttctacac

SEQ ID NO: 844 - DNA, 18 bp, Vaccinia virus
cccatttccttccagtca

SEQ ID NO: 845 - DNA, 18 bp, Vaccinia virus
ttctcataaatggatctg

SEQ ID NO: 846 - DNA, 23 bp, Vaccinia virus
ccctgcagtgcagacatcgtcaa

SEQ ID NO: 847 - DNA, 19 bp, Vaccinia virus
gaggtttctcagaatatct

SEQ ID NO: 848 - DNA, 18 bp, Vaccinia virus
tgtgtgaactagcaaaga

SEQ ID NO: 849 - DNA, 22 bp, Vaccinia virus
ccacttttctaccagtaaaaga

SEQ ID NO: 850 - DNA, 21 bp, Vaccinia virus
taattcttgttctgtaacatg

SEQ ID NO: 851 - DNA, 17 bp, Vaccinia virus
tgtttctgtttcatatc

SEQ ID NO: 852 - DNA, 18 bp, Vaccinia virus
taagaagaaatgcaaaag

SEQ ID NO: 853 - DNA, 23 bp, Vaccinia virus
aaagaagagtttacagacaataa

SEQ ID NO: 854 - DNA, 24 bp, Vaccinia virus
gaggggaaaaaattaactgctcca

SEQ ID NO: 855 - DNA, 21 bp, Vaccinia virus
aaaactttatgaacttcacca

SEQ ID NO: 856 - DNA, 20 bp, Vaccinia virus
gaagacagacatctgtggaa

SEQ ID NO: 857 - DNA, 21 bp, Vaccinia virus
cagcccagcaccccttcctcg

SEQ ID NO: 858 - DNA, 22 bp, Vaccinia virus
cagtgatgactattctcaaatg

SEQ ID NO: 859 - DNA, 18 bp, Vaccinia virus
tttgattgggatgttata

SEQ ID NO: 860 - DNA, 17 bp, Vaccinia virus
ctctgagtcctgaggag

SEQ ID NO: 861 - DNA, 22 bp, Vaccinia virus
aaataacagaaaacccagcaaa

SEQ ID NO: 862 - DNA, 20 bp, Vaccinia virus
aaataatctgaaactagaaa

SEQ ID NO: 863 - DNA, 25 bp, Vaccinia virus
atccacatggtacaagcctttctca

SEQ ID NO: 864 - DNA, 19 bp, Vaccinia virus
tagaaatagatatttttaa

SEQ ID NO: 865 - DNA, 22 bp, Vaccinia virus
aaaactcaaacgaataaaaaag

SEQ ID NO: 866 - DNA, 20 bp, Vaccinia virus
aagagtcatcatagtaggaa

SEQ ID NO: 867 - DNA, 18 bp, Vaccinia virus
tgttcttttcctctcttc

SEQ ID NO: 868 - DNA, 18 bp, Vaccinia virus
acctaactgcaatgtgga

SEQ ID NO: 869 - DNA, 21 bp, Vaccinia virus
aggaacaaaaattacaaagaa

SEQ ID NO: 870 - DNA, 22 bp, Vaccinia virus
ttgccactcccccactccttct

SEQ ID NO: 871 - DNA, 24 bp, Vaccinia virus
taaaatctatgtgttttagactta

SEQ ID NO: 872 - DNA, 23 bp, Vaccinia virus
tactgcactaccaaattcatttg

SEQ ID NO: 873 - DNA, 20 bp, Vaccinia virus
ttaaatgtttgggttcatac

SEQ ID NO: 874 - DNA, 20 bp, Vaccinia virus
ttcccctccaccaaacccca

SEQ ID NO: 875 - DNA, 24 bp, Vaccinia virus
acaaacctcgaaacgaacagttaa

SEQ ID NO: 876 - DNA, 21 bp, Vaccinia virus
ctatggacaaggaagaatagt

SEQ ID NO: 877 - DNA, 20 bp, Vaccinia virus
tatgaatcatacatacactc

SEQ ID NO: 878 - DNA, 19 bp, Vaccinia virus
gataccaaaaagttgcaat

SEQ ID NO: 879 - DNA, 21 bp, Vaccinia virus
aaacaatgcagtacaggacat

SEQ ID NO: 880 - DNA, 19 bp, Vaccinia virus
attgaaaggagagcaacgg

SEQ ID NO: 881 - DNA, 19 bp, Vaccinia virus
tctccagatgagagtacac

SEQ ID NO: 882 - DNA, 19 bp, Vaccinia virus
tctccagatgagagtacac

SEQ ID NO: 883 - DNA, 19 bp, Vaccinia virus
tctccagatgagagtacac

SEQ ID NO: 884 - DNA, 21 bp, Vaccinia virus
atatttttgtggctgcttttt

SEQ ID NO: 885 - DNA, 24 bp, Vaccinia virus
taaataattttataattcaacaaa

SEQ ID NO: 886 - DNA, 19 bp, Vaccinia virus
tataaagaacccagttcca

SEQ ID NO: 887 - DNA, 18 bp, Vaccinia virus
aatggcgttttataaatt

SEQ ID NO: 888 - DNA, 20 bp, Vaccinia virus
ctcttaaaaagatgctatgc

SEQ ID NO: 889 - DNA, 21 bp, Vaccinia virus
gcatcagtgtttttcaactcc

SEQ ID NO: 890 - DNA, 19 bp, Vaccinia virus
agccacagaaagcaagccg

SEQ ID NO: 891 - DNA, 18 bp, Vaccinia virus
aggactttctgtgccaca

SEQ ID NO: 892 - DNA, 20 bp, Vaccinia virus
aggctgggctgagccaaagc

SEQ ID NO: 893 - DNA, 17 bp, Vaccinia virus
tattttccttctctctc

SEQ ID NO: 894 - DNA, 20 bp, Vaccinia virus
gctaatgaagaaaacttctc

SEQ ID NO: 895 - DNA, 19 bp, Vaccinia virus
ggaataaagttttatcaaa

SEQ ID NO: 896 - DNA, 21 bp, Vaccinia virus
agacacatggctatcctagag

SEQ ID NO: 897 - DNA, 19 bp, Vaccinia virus
tggtaagaaggatatttaa

SEQ ID NO: 898 - DNA, 19 bp, Vaccinia virus
gaggagccactgccaaact

SEQ ID NO: 899 - DNA, 18 bp, Vaccinia virus
attctcccttctctcttt

SEQ ID NO: 900 - DNA, 18 bp, Vaccinia virus
tccttccccaatcacctt

SEQ ID NO: 901 - DNA, 23 bp, Vaccinia virus
gttctgttgtttttatagcaggg

SEQ ID NO: 902 - DNA, 19 bp, Vaccinia virus
attttgtgaatggattgga

SEQ ID NO: 903 - DNA, 25 bp, Vaccinia virus
tctcacacacacacaggcccataga

SEQ ID NO: 904 - DNA, 21 bp, Vaccinia virus
actagaacaacccaaatagca

SEQ ID NO: 905 - DNA, 18 bp, Vaccinia virus
gtcagaaactgccatttg

SEQ ID NO: 906 - DNA, 16 bp, Vaccinia virus
tctattttgccacaag

SEQ ID NO: 907 - DNA, 18 bp, Vaccinia virus
tgtgaaattctgtccaaa

SEQ ID NO: 908 - DNA, 20 bp, Vaccinia virus
tagaaatggagagtttaata

SEQ ID NO: 909 - DNA, 16 bp, Vaccinia virus
agtaaatgtcctgcta

SEQ ID NO: 910 - DNA, 18 bp, Vaccinia virus
atcttgtttcacactagt

SEQ ID NO: 911 - DNA, 15 bp, Vaccinia virus
tctgcatctgtccac

SEQ ID NO: 912 - DNA, 19 bp, Vaccinia virus
caggaacaaaacactgcct

SEQ ID NO: 913 - DNA, 19 bp, Vaccinia virus
gctaaaaacactcatccta

SEQ ID NO: 914 - DNA, 21 bp, Vaccinia virus
aggatatttaagaaaatacaa

SEQ ID NO: 915 - DNA, 18 bp, Vaccinia virus
tcccctccctacctcatg

SEQ ID NO: 916 - DNA, 22 bp, Vaccinia virus
atttatttaaccaatgacctta

SEQ ID NO: 917 - DNA, 15 bp, Vaccinia virus
cgttggaagagtctt

SEQ ID NO: 918 - DNA, 22 bp, Vaccinia virus
ccccatacaccatctattccat

SEQ ID NO: 919 - DNA, 24 bp, Vaccinia virus
aagtatagtgactcagaatcctca

SEQ ID NO: 920 - DNA, 27 bp, Vaccinia virus
aacaagcctccttttaaagtaacccta

SEQ ID NO: 921 - DNA, 19 bp, Vaccinia virus
tagctccttttgaccttca

SEQ ID NO: 922 - DNA, 20 bp, Vaccinia virus
tatctctgtttccttttaca

SEQ ID NO: 923 - DNA, 18 bp, Vaccinia virus
ccattccatggaaataaa

SEQ ID NO: 924 - DNA, 24 bp, Vaccinia virus
ttaaatatgcatctggcccaggaa

SEQ ID NO: 925 - DNA, 18 bp, Vaccinia virus
atgccaactcttaagatt

SEQ ID NO: 926 - DNA, 23 bp, Vaccinia virus
ttttttttctctctctctctctc

SEQ ID NO: 927 - DNA, 16 bp, Vaccinia virus
agccacaggagatgtc

SEQ ID NO: 928 - DNA, 21 bp, Vaccinia virus
aaatgaaagtgatgatactgt

SEQ ID NO: 929 - DNA, 18 bp, Vaccinia virus
tatttttggtttctctct

SEQ ID NO: 930 - DNA, 18 bp, Vaccinia virus
tcagcatttttattccca

SEQ ID NO: 931 - DNA, 20 bp, Vaccinia virus
aaaatactacatctttctgg

SEQ ID NO: 932 - DNA, 17 bp, Vaccinia virus
cgtgtctttgtgctgtg

SEQ ID NO: 933 - DNA, 19 bp, Vaccinia virus
accaaaactgcaatcagga

SEQ ID NO: 934 - DNA, 23 bp, Vaccinia virus
tggaaaagaaaaccctgtaggca

SEQ ID NO: 935 - DNA, 18 bp, Vaccinia virus
tctcataaatgggtggga

SEQ ID NO: 936 - DNA, 20 bp, Vaccinia virus
gatgcaaacattggaagatt

SEQ ID NO: 937 - DNA, 24 bp, Vaccinia virus
acattcattgaattattatcactg

SEQ ID NO: 938 - DNA, 22 bp, Vaccinia virus
aaacagtattaatgcagaaatg

SEQ ID NO: 939 - DNA, 18 bp, Vaccinia virus
tattttttttctctattc

SEQ ID NO: 940 - DNA, 24 bp, Vaccinia virus
gccatgcaattcatcccagaggaa

SEQ ID NO: 941 - DNA, 18 bp, Vaccinia virus
ctgggagaaggtctccaa

SEQ ID NO: 942 - DNA, 20 bp, Vaccinia virus
aagcagaaaacaaaaacaac

SEQ ID NO: 943 - DNA, 20 bp, Vaccinia virus
gcaatgctatccattgatgt

SEQ ID NO: 944 - DNA, 26 bp, Vaccinia virus
tgtccatataccagatttaaaatatt

SEQ ID NO: 945 - DNA, 18 bp, Vaccinia virus
aagtaattttttcaaaga

SEQ ID NO: 946 - DNA, 19 bp, Vaccinia virus
agatgagaactggtggtta

SEQ ID NO: 947 - DNA, 19 bp, Vaccinia virus
taatagcctactattgacc

SEQ ID NO: 948 - DNA, 20 bp, Vaccinia virus
tgccaagaagattccttcta

SEQ ID NO: 949 - DNA, 23 bp, Vaccinia virus
gccatttgacaccctttatgatg

SEQ ID NO: 950 - DNA, 18 bp, Vaccinia virus
attcgttttctctctctc

SEQ ID NO: 951 - DNA, 24 bp, Vaccinia virus
ggaaaagagagctctctacatgaa

SEQ ID NO: 952 - DNA, 18 bp, Vaccinia virus
tatttttcttctcccttt

SEQ ID NO: 953 - DNA, 19 bp, Vaccinia virus
tctaacgaattaccacaaa

SEQ ID NO: 954 - DNA, 23 bp, Vaccinia virus
gcaatcagtaaaacattgagctc

SEQ ID NO: 955 - DNA, 25 bp, Vaccinia virus
aaaaaactccatgttattggactaa

SEQ ID NO: 956 - DNA, 22 bp, Vaccinia virus
tgactttcttctcaaacctgga

SEQ ID NO: 957 - DNA, 17 bp, Vaccinia virus
tagccacagacatgctg

SEQ ID NO: 958 - DNA, 18 bp, Vaccinia virus
tttgctctctttctccct

SEQ ID NO: 959 - DNA, 18 bp, Vaccinia virus
tttgctctctttctccct

SEQ ID NO: 960 - DNA, 22 bp, Vaccinia virus
ttgcatcaagggctttatcaaa

SEQ ID NO: 961 - DNA, 21 bp, Vaccinia virus
caaacaaggctcaaaattctc

SEQ ID NO: 962 - DNA, 19 bp, Vaccinia virus
agataaacacaaaatccat

SEQ ID NO: 963 - DNA, 18 bp, Vaccinia virus
atgcaaaactcaacgatc

SEQ ID NO: 964 - DNA, 19 bp, Vaccinia virus
gaagcaccgggaagactta

SEQ ID NO: 965 - DNA, 17 bp, Vaccinia virus
cccctctttcacttcat

SEQ ID NO: 966 - DNA, 25 bp, Vaccinia virus
agaatggaaataaaactcaatatta

SEQ ID NO: 967 - DNA, 18 bp, Vaccinia virus
acctgcaactgtaatttg

SEQ ID NO: 968 - DNA, 21 bp, Vaccinia virus
ttttgaactacagatgttgta

SEQ ID NO: 969 - DNA, 20 bp, Vaccinia virus
tattttcttttcctctcttt

SEQ ID NO: 970 - DNA, 20 bp, Vaccinia virus
gaaaggtgttcttacatgaa

SEQ ID NO: 971 - DNA, 18 bp, Vaccinia virus
tagagattaaaccaatta

SEQ ID NO: 972 - DNA, 18 bp, Vaccinia virus
tgaagcccgctgtgttca

SEQ ID NO: 973 - DNA, 17 bp, Vaccinia virus
gctggtgagccagtggc

SEQ ID NO: 974 - DNA, 23 bp, Vaccinia virus
catcaaagccaaaaggacctaca

SEQ ID NO: 975 - DNA, 24 bp, Vaccinia virus
gaagaggaattaaaatatacagga

SEQ ID NO: 976 - DNA, 22 bp, Vaccinia virus
cagaaacagtattttcttccca

SEQ ID NO: 977 - DNA, 21 bp, Vaccinia virus
ctaatgttatttcttaaaatt

SEQ ID NO: 978 - DNA, 20 bp, Vaccinia virus
ctttaaaataaaatgcagac

SEQ ID NO: 979 - DNA, 22 bp, Vaccinia virus
ttcccctcactatcctacccca

SEQ ID NO: 980 - DNA, 19 bp, Vaccinia virus
tggtaatacaatactgata

SEQ ID NO: 981 - DNA, 21 bp, Vaccinia virus
acaaagtttacatttcatact

SEQ ID NO: 982 - DNA, 18 bp, Vaccinia virus
tcccttccccactccatg

SEQ ID NO: 983 - DNA, 20 bp, Vaccinia virus
gactgaaaagaaattctcca

SEQ ID NO: 984 - DNA, 17 bp, Vaccinia virus
tagtcacagaactgctg

SEQ ID NO: 985 - DNA, 18 bp, Vaccinia virus
tcatgtggagtgaaaggc

SEQ ID NO: 986 - DNA, 19 bp, Vaccinia virus
aggggattggaaacatcgt

SEQ ID NO: 987 - DNA, 22 bp, Vaccinia virus
ataaaaagggacatgaaaatga

SEQ ID NO: 988 - DNA, 16 bp, Vaccinia virus
ttgccatcctgcttct

SEQ ID NO: 989 - DNA, 18 bp, Vaccinia virus
gtgactgtaaactctatg

SEQ ID NO: 990 - DNA, 18 bp, Vaccinia virus
taacttcatgaagactta

SEQ ID NO: 991 - DNA, 18 bp, Vaccinia virus
aatcataatcatctgata

SEQ ID NO: 992 - DNA, 24 bp, Vaccinia virus
gtctcactgtttgatcaaacttct

SEQ ID NO: 993 - DNA, 20 bp, Vaccinia virus
agtaaatacaatttttaaaa

SEQ ID NO: 994 - DNA, 18 bp, Vaccinia virus
agtcacaatcatcatgtc

SEQ ID NO: 995 - DNA, 18 bp, Vaccinia virus
taatgtagagataaaagc

SEQ ID NO: 996 - DNA, 18 bp, Vaccinia virus
tattacactgtatttgta

SEQ ID NO: 997 - DNA, 19 bp, Vaccinia virus
agaaagtttgacaaaaata

SEQ ID NO: 998 - DNA, 17 bp, Vaccinia virus
taagggaatcccttgta

SEQ ID NO: 999 - DNA, 16 bp, Vaccinia virus
ccaatatatcttctca

SEQ ID NO: 1000 - DNA, 18 bp, Vaccinia virus
ctagatcaacagatcaac

SEQ ID NO: 1001 - DNA, 24 bp, Vaccinia virus
ggaaactgtttaatatcacatgaa

SEQ ID NO: 1002 - DNA, 22 bp, Vaccinia virus
aatgcctgtatataaatatgaa

SEQ ID NO: 1003 - DNA, 18 bp, Vaccinia virus
tttcttctagttctttct

SEQ ID NO: 1004 - DNA, 18 bp, Vaccinia virus
taatgtttgcacactgaa

SEQ ID NO: 1005 - DNA, 21 bp, Vaccinia virus
tctggtgatggtttccacagg

SEQ ID NO: 1006 - DNA, 18 bp, Vaccinia virus
atttattcttggtgaaga

SEQ ID NO: 1007 - DNA, 22 bp, Vaccinia virus
aggaccgttcacatacaaagaa

SEQ ID NO: 1008 - DNA, 18 bp, Vaccinia virus
atatgctaaacaaaagaa

SEQ ID NO: 1009 - DNA, 21 bp, Vaccinia virus
atcaacaaaagggagaacatg

SEQ ID NO: 1010 - DNA, 22 bp, Vaccinia virus
aataaatgttgaaaccaactga

SEQ ID NO: 1011 - DNA, 18 bp, Vaccinia virus
agttgcgaaaccatgtcg

SEQ ID NO: 1012 - DNA, 21 bp, Vaccinia virus
ccgtgttggcggccgcagcgg

SEQ ID NO: 1013 - DNA, 16 bp, Vaccinia virus
tgtgagctttatcaga

SEQ ID NO: 1014 - DNA, 16 bp, Vaccinia virus
ctgcaagggacgagtc

SEQ ID NO: 1015 - DNA, 19 bp, Vaccinia virus
ctgggtccacatcctgcta

SEQ ID NO: 1016 - DNA, 16 bp, Vaccinia virus
acctgatgtgtacatc

SEQ ID NO: 1017 - DNA, 23 bp, Vaccinia virus
cgaatcaaaacaacccccacaca

SEQ ID NO: 1018 - DNA, 23 bp, Vaccinia virus
ctttgatgtattctagtttatct

SEQ ID NO: 1019 - DNA, 21 bp, Vaccinia virus
cagctgggcgcccactctcct

SEQ ID NO: 1020 - DNA, 18 bp, Vaccinia virus
ccaagaaagctaactcct

SEQ ID NO: 1021 - DNA, 18 bp, Vaccinia virus
gaaaatcatgaaatgcct

SEQ ID NO: 1022 - DNA, 19 bp, Vaccinia virus
tggtgagaaacccaacaaa

SEQ ID NO: 1023 - DNA, 19 bp, Vaccinia virus
gcttacattgctatttgta

SEQ ID NO: 1024 - DNA, 21 bp, Vaccinia virus
atttttcttttgtttctctct

SEQ ID NO: 1025 - DNA, 21 bp, Vaccinia virus
atttttcttttgtttctctct

SEQ ID NO: 1026 - DNA, 19 bp, Vaccinia virus
tctccccctttctctcttc

SEQ ID NO: 1027 - DNA, 23 bp, Vaccinia virus
ctaatgaattgagcacatctaat

SEQ ID NO: 1028 - DNA, 26 bp, Vaccinia virus
caggagtgggttgatttcagcaccta

SEQ ID NO: 1029 - DNA, 20 bp, Vaccinia virus
ctagagcactgccaccagta

SEQ ID NO: 1030 - DNA, 19 bp, Vaccinia virus
tgactatggataaactaaa

SEQ ID NO: 1031 - DNA, 18 bp, Vaccinia virus
taatgcttggaatgggag

SEQ ID NO: 1032 - DNA, 22 bp, Vaccinia virus
acctactaatagtttgttgatc

SEQ ID NO: 1033 - DNA, 21 bp, Vaccinia virus
gaaaaaaaaagcttgtggcca

SEQ ID NO: 1034 - DNA, 16 bp, Vaccinia virus
tctgttgctactaagc

SEQ ID NO: 1035 - DNA, 25 bp, Vaccinia virus
aatggtttttgttttaacaatatta

SEQ ID NO: 1036 - DNA, 18 bp, Vaccinia virus
atgaatgaaaatacatct

SEQ ID NO: 1037 - DNA, 19 bp, Vaccinia virus
cagaacactcctatttgta

SEQ ID NO: 1038 - DNA, 21 bp, Vaccinia virus
ccatagtgcacatattccagg

SEQ ID NO: 1039 - DNA, 20 bp, Vaccinia virus
tttgctgataaatttgcagt

SEQ ID NO: 1040 - DNA, 19 bp, Vaccinia virus
agttgggtaacaaaaatgg

SEQ ID NO: 1041 - DNA, 21 bp, Vaccinia virus
ggaaaactgaagactttaata

SEQ ID NO: 1042 - DNA, 18 bp, Vaccinia virus
ggtaatttatagaacaaa

SEQ ID NO: 1043 - DNA, 22 bp, Vaccinia virus
tagaacaatagaaactttaata

SEQ ID NO: 1044 - DNA, 20 bp, Vaccinia virus
aatatagatattttatatac

SEQ ID NO: 1045 - DNA, 16 bp, Vaccinia virus
ttggaaatcagttgtg

SEQ ID NO: 1046 - DNA, 22 bp, Vaccinia virus
tgtgatatttctttgtgccaaa

SEQ ID NO: 1047 - DNA, 22 bp, Vaccinia virus
aggacccttataggtactcaca

SEQ ID NO: 1048 - DNA, 18 bp, Vaccinia virus
tgacagtgcagtgcaaac

SEQ ID NO: 1049 - DNA, 21 bp, Vaccinia virus
aagatgtgaccactacatgta

SEQ ID NO: 1050 - DNA, 21 bp, Vaccinia virus
catgggtagctacccaataag

SEQ ID NO: 1051 - DNA, 21 bp, Vaccinia virus
ccatctaatgtgattgctaag

SEQ ID NO: 1052 - DNA, 21 bp, Vaccinia virus
tcccactccctacttctgcca

SEQ ID NO: 1053 - DNA, 22 bp, Vaccinia virus
ttgctgagaaggcttcattaaa

SEQ ID NO: 1054 - DNA, 23 bp, Vaccinia virus
tatttttattctcttaagtcttt

SEQ ID NO: 1055 - DNA, 22 bp, Vaccinia virus
tgtgacttttatggaattaaga

SEQ ID NO: 1056 - DNA, 18 bp, Vaccinia virus
gaagattacagttatgta

SEQ ID NO: 1057 - DNA, 24 bp, Vaccinia virus
gctggtgtaaacaaacctactaca

SEQ ID NO: 1058 - DNA, 19 bp, Vaccinia virus
tactacactgccagttgta

SEQ ID NO: 1059 - DNA, 20 bp, Vaccinia virus
ttttgtaaaacttttttttc

SEQ ID NO: 1060 - DNA, 21 bp, Vaccinia virus
cctgcctatcctctccgatca

SEQ ID NO: 1061 - DNA, 18 bp, Vaccinia virus
tcagcaccattattccca

SEQ ID NO: 1062 - DNA, 18 bp, Vaccinia virus
atttattctgagcctgag

SEQ ID NO: 1063 - DNA, 21 bp, Vaccinia virus
tatgaatgaaaacaaaacacc

SEQ ID NO: 1064 - DNA, 21 bp, Vaccinia virus
aataaagaaaaaaaatctcca

SEQ ID NO: 1065 - DNA, 20 bp, Vaccinia virus
tttataggtagttgtttaca

SEQ ID NO: 1066 - DNA, 19 bp, Vaccinia virus
gtcatattaagaaacacct

SEQ ID NO: 1067 - DNA, 19 bp, Vaccinia virus
tctgcatccatttgaacac

SEQ ID NO: 1068 - DNA, 18 bp, Vaccinia virus
ctaatgaaaaactgctta

SEQ ID NO: 1069 - DNA, 17 bp, Vaccinia virus
gaaattagtgtggggaa

SEQ ID NO: 1070 - DNA, 16 bp, Vaccinia virus
gttggatcaactaatg

SEQ ID NO: 1071 - DNA, 21 bp, Vaccinia virus
gaaaggacagttttacatgaa

SEQ ID NO: 1072 - DNA, 23 bp, Vaccinia virus
tgtgcaattacgtccaccaaaga

SEQ ID NO: 1073 - DNA, 18 bp, Vaccinia virus
cagataatgcttccagtg

SEQ ID NO: 1074 - DNA, 18 bp, Vaccinia virus
tggtgaaatcctatctct

SEQ ID NO: 1075 - DNA, 20 bp, Vaccinia virus
aaacctttgaaattagcatt

SEQ ID NO: 1076 - DNA, 22 bp, Vaccinia virus
aatatttttgtacctttctcct

SEQ ID NO: 1077 - DNA, 20 bp, Vaccinia virus
gctaatgaaatgggaacctc

SEQ ID NO: 1078 - DNA, 18 bp, Vaccinia virus
gtctgtttttgttcccga

SEQ ID NO: 1079 - DNA, 20 bp, Vaccinia virus
gtgggtcatcccagcacctg

SEQ ID NO: 1080 - DNA, 20 bp, Vaccinia virus
agcgttaacacaaaatccat

SEQ ID NO: 1081 - DNA, 20 bp, Vaccinia virus
actgtcaaagaatcaatcca

SEQ ID NO: 1082 - DNA, 28 bp, Vaccinia virus
gacaaaattttctcattttcttttcact

SEQ ID NO: 1083 - DNA, 19 bp, Vaccinia virus
tgatttactggaagacttg

SEQ ID NO: 1084 - DNA, 22 bp, Vaccinia virus
gttctgttacccagggctctgc

SEQ ID NO: 1085 - DNA, 17 bp, Vaccinia virus
gttgaaaagccaaaggt

SEQ ID NO: 1086 - DNA, 19 bp, Vaccinia virus
ctaatgaaaaacattactc

SEQ ID NO: 1087 - DNA, 21 bp, Vaccinia virus
tattgaggattgagccagtgc

SEQ ID NO: 1088 - DNA, 24 bp, Vaccinia virus
ggacaccagagctgccgacttgga

SEQ ID NO: 1089 - DNA, 23 bp, Vaccinia virus
atccactaaactggtcttcttca

SEQ ID NO: 1090 - DNA, 21 bp, Vaccinia virus
tattgagccatgaataattta

SEQ ID NO: 1091 - DNA, 18 bp, Vaccinia virus
gccacagaacacatacag

SEQ ID NO: 1092 - DNA, 19 bp, Vaccinia virus
agatgagaagactagcagc

SEQ ID NO: 1093 - DNA, 17 bp, Vaccinia virus
gctgataagataaaaaa

SEQ ID NO: 1094 - DNA, 20 bp, Vaccinia virus
tgtgtgaaatttaaaaaagg

SEQ ID NO: 1095 - DNA, 20 bp, Vaccinia virus
ccccttgctcccactccatg

SEQ ID NO: 1096 - DNA, 22 bp, Vaccinia virus
ggacaccagaagacgattcaga

SEQ ID NO: 1097 - DNA, 20 bp, Vaccinia virus
agaatggaaatttataatat

SEQ ID NO: 1098 - DNA, 17 bp, Vaccinia virus
tggtgaactccacctcc

SEQ ID NO: 1099 - DNA, 21 bp, Vaccinia virus
gaaaccttgacaggtacttca

SEQ ID NO: 1100 - DNA, 21 bp, Vaccinia virus
atctctgtttctagatttagt

SEQ ID NO: 1101 - DNA, 20 bp, Vaccinia virus
ggaggggacgctagtcgcgg

SEQ ID NO: 1102 - DNA, 20 bp, Vaccinia virus
aacctccttgttttagacac

SEQ ID NO: 1103 - DNA, 16 bp, Vaccinia virus
agccacagaagatgtc

SEQ ID NO: 1104 - DNA, 21 bp, Vaccinia virus
aacagtcccagaatgacccca

SEQ ID NO: 1105 - DNA, 23 bp, Vaccinia virus
ttcccctcacttaaccaccccat

SEQ ID NO: 1106 - DNA, 19 bp, Vaccinia virus
tactgatggtactgttatt

SEQ ID NO: 1107 - DNA, 19 bp, Vaccinia virus
acaaaggtcttcttttcct

SEQ ID NO: 1108 - DNA, 20 bp, Vaccinia virus
ttctcataaaattgggcaca

SEQ ID NO: 1109 - DNA, 18 bp, Vaccinia virus
tgcacgttaaaagttgac

SEQ ID NO: 1110 - DNA, 20 bp, Vaccinia virus
cagctccgacgcagctcctc

SEQ ID NO: 1111 - DNA, 18 bp, Vaccinia virus
gaaaagagttcttcagat

SEQ ID NO: 1112 - DNA, 19 bp, Vaccinia virus
caataaatggtagctatta

SEQ ID NO: 1113 - DNA, 22 bp, Vaccinia virus
tggaaaagaaaaactggtgcca

SEQ ID NO: 1114 - DNA, 19 bp, Vaccinia virus
atttctggtaataagaagc

SEQ ID NO: 1115 - DNA, 19 bp, Vaccinia virus
aaagcgacccattcagaga

SEQ ID NO: 1116 - DNA, 22 bp, Vaccinia virus
ggacacggccctgcattctgga

SEQ ID NO: 1117 - DNA, 20 bp, Vaccinia virus
tcccctctccacccacccca

SEQ ID NO: 1118 - DNA, 17 bp, Vaccinia virus
ttcaatggacccacagg

SEQ ID NO: 1119 - DNA, 22 bp, Vaccinia virus
agaaaaaatatgacttttttac

SEQ ID NO: 1120 - DNA, 21 bp, Vaccinia virus
cctcttcctactggtctctct

SEQ ID NO: 1121 - DNA, 22 bp, Vaccinia virus
cagttgaacccagcagcccgcc

SEQ ID NO: 1122 - DNA, 21 bp, Vaccinia virus
acaaattctattgaagtattt

SEQ ID NO: 1123 - DNA, 20 bp, Vaccinia virus
ttagtggttatttctaaaat

SEQ ID NO: 1124 - DNA, 19 bp, Vaccinia virus
gccaatggagactgtctca

SEQ ID NO: 1125 - DNA, 19 bp, Vaccinia virus
aaagttcggggaaaatacc

SEQ ID NO: 1126 - DNA, 22 bp, Vaccinia virus
caagatcatagtatttcagtca

SEQ ID NO: 1127 - DNA, 18 bp, Vaccinia virus
tgccaagagcctgcccct

SEQ ID NO: 1128 - DNA, 19 bp, Vaccinia virus
actgtaattagaaaaatac

SEQ ID NO: 1129 - DNA, 18 bp, Vaccinia virus
atctctgtctttaccagc

SEQ ID NO: 1130 - DNA, 23 bp, Vaccinia virus
atattttctcaatcttaggagga

SEQ ID NO: 1131 - DNA, 22 bp, Vaccinia virus
tgttttaaaaaggaactgcagc

SEQ ID NO: 1132 - DNA, 20 bp, Vaccinia virus
ttctcatagacgtcctgaga

SEQ ID NO: 1133 - DNA, 23 bp, Vaccinia virus
aaagaaataggttcacaacagga

SEQ ID NO: 1134 - DNA, 18 bp, Vaccinia virus
atttctgggagcatttac

SEQ ID NO: 1135 - DNA, 19 bp, Vaccinia virus
ttctatccttctacccaaa

SEQ ID NO: 1136 - DNA, 21 bp, Vaccinia virus
tacacttggggagatttgcca

SEQ ID NO: 1137 - DNA, 16 bp, Vaccinia virus
gttctttgaagactta

SEQ ID NO: 1138 - DNA, 22 bp, Vaccinia virus
gcgtggggttttttaatctctg

SEQ ID NO: 1139 - DNA, 18 bp, Vaccinia virus
tctcttatttctcttttc

SEQ ID NO: 1140 - DNA, 21 bp, Vaccinia virus
aaaacagcagccctattcaga

SEQ ID NO: 1141 - DNA, 20 bp, Vaccinia virus
tgcacagtagatgctatgga

SEQ ID NO: 1142 - DNA, 18 bp, Vaccinia virus
ctaatgaaaattattctc

SEQ ID NO: 1143 - DNA, 18 bp, Vaccinia virus
tttattctcttcccttct

SEQ ID NO: 1144 - DNA, 20 bp, Vaccinia virus
agcattctgagaaatgtcta

SEQ ID NO: 1145 - DNA, 19 bp, Vaccinia virus
tgtccatagaaaaaatatt

SEQ ID NO: 1146 - DNA, 19 bp, Vaccinia virus
agtcacagactgtcctgcc

SEQ ID NO: 1147 - DNA, 18 bp, Vaccinia virus
ggaaaaaaggtttcacat

SEQ ID NO: 1148 - DNA, 18 bp, Vaccinia virus
ttctgtgcccaccacaag

SEQ ID NO: 1149 - DNA, 18 bp, Vaccinia virus
aaaggtatttgggcaaac

SEQ ID NO: 1150 - DNA, 21 bp, Vaccinia virus
tagaaatagaacagcttaata

SEQ ID NO: 1151 - DNA, 21 bp, Vaccinia virus
ccacttaataaaaatagaggc

SEQ ID NO: 1152 - DNA, 21 bp, Vaccinia virus
ctgagcatatctctcgtaaca

SEQ ID NO: 1153 - DNA, 20 bp, Vaccinia virus
ttggaaatttttctgttgaa

SEQ ID NO: 1154 - DNA, 20 bp, Vaccinia virus
agtccaattaaaatatggaa

SEQ ID NO: 1155 - DNA, 18 bp, Vaccinia virus
agtaataatttattccca

SEQ ID NO: 1156 - DNA, 20 bp, Vaccinia virus
ctactgttatctctaaaatt

SEQ ID NO: 1157 - DNA, 18 bp, Vaccinia virus
tagaacacaccttttcca

SEQ ID NO: 1158 - DNA, 20 bp, Vaccinia virus
aaataaaaacaagtatctca

SEQ ID NO: 1159 - DNA, 18 bp, Vaccinia virus
tgatagtgtctgcacaac

SEQ ID NO: 1160 - DNA, 16 bp, Vaccinia virus
tagtcacaggagctgc

SEQ ID NO: 1161 - DNA, 18 bp, Vaccinia virus
atctcagtctcaatcacc

SEQ ID NO: 1162 - DNA, 15 bp, Vaccinia virus
ctaatgatcatctga

SEQ ID NO: 1163 - DNA, 25 bp, Vaccinia virus
agaattcaagaacttgttacatgta

SEQ ID NO: 1164 - DNA, 21 bp, Vaccinia virus
gaccccagcattatttctata

SEQ ID NO: 1165 - DNA, 17 bp, Vaccinia virus
tccatagaatatattct

SEQ ID NO: 1166 - DNA, 24 bp, Vaccinia virus
aatattatattttttctataaaaa

SEQ ID NO: 1167 - DNA, 21 bp, Vaccinia virus
ccagagacaaatatttctaga

SEQ ID NO: 1168 - DNA, 20 bp, Vaccinia virus
atggagtcccctctagggtt

SEQ ID NO: 1169 - DNA, 17 bp, Vaccinia virus
agtgtcattttatttta

SEQ ID NO: 1170 - DNA, 19 bp, Vaccinia virus
cagcatgccaacagtaata

SEQ ID NO: 1171 - DNA, 20 bp, Vaccinia virus
atcagcatgaaaacatccta

SEQ ID NO: 1172 - DNA, 19 bp, Vaccinia virus
gctaatgacctggctttca

SEQ ID NO: 1173 - DNA, 19 bp, Vaccinia virus
gtacacacagtgactatta

SEQ ID NO: 1174 - DNA, 20 bp, Vaccinia virus
tagaagaaaaatgtacctta

SEQ ID NO: 1175 - DNA, 16 bp, Vaccinia virus
tgttggttgtaccaaa

SEQ ID NO: 1176 - DNA, 22 bp, Vaccinia virus
agccagacaaaatttgagaata

SEQ ID NO: 1177 - DNA, 21 bp, Vaccinia virus
gccacggaaacatacagagga

SEQ ID NO: 1178 - DNA, 23 bp, Vaccinia virus
taagggaagatcactgtagttta

SEQ ID NO: 1179 - DNA, 24 bp, Vaccinia virus
caagaaaatttaaaacgatcccaa

SEQ ID NO: 1180 - DNA, 18 bp, Vaccinia virus
catgtgtattaatgtcta

SEQ ID NO: 1181 - DNA, 16 bp, Vaccinia virus
gagaaagagagagata

SEQ ID NO: 1182 - DNA, 22 bp, Vaccinia virus
attggtcatcttccctatcaca

SEQ ID NO: 1183 - DNA, 15 bp, Vaccinia virus
ctgttggtgtgctgc

SEQ ID NO: 1184 - DNA, 19 bp, Vaccinia virus
ttcccctctattgttcccc

SEQ ID NO: 1185 - DNA, 18 bp, Vaccinia virus
tactacatgctttttgta

SEQ ID NO: 1186 - DNA, 20 bp, Vaccinia virus
aatgttccatttttgttttc

SEQ ID NO: 1187 - DNA, 19 bp, Vaccinia virus
tctctggaagaatttccaa

SEQ ID NO: 1188 - DNA, 21 bp, Vaccinia virus
cgttagtaaacttacttcata

SEQ ID NO: 1189 - DNA, 15 bp, Vaccinia virus
gcgaggagcatcaga

SEQ ID NO: 1190 - DNA, 19 bp, Vaccinia virus
atatgccaaaaaatgagag

SEQ ID NO: 1191 - DNA, 18 bp, Vaccinia virus
aggggacactggtaacat

SEQ ID NO: 1192 - DNA, 21 bp, Vaccinia virus
ataatgtcttcagtggaacac

SEQ ID NO: 1193 - DNA, 18 bp, Vaccinia virus
aaaggaagtgataaacta

SEQ ID NO: 1194 - DNA, 19 bp, Vaccinia virus
ccccatcgcctactccatg

SEQ ID NO: 1195 - DNA, 23 bp, Vaccinia virus
ctccacttggaatgggtaccaca

SEQ ID NO: 1196 - DNA, 18 bp, Vaccinia virus
acaagaaaaaagattata

SEQ ID NO: 1197 - DNA, 21 bp, Vaccinia virus
atgaagaataaactgatgcta

SEQ ID NO: 1198 - DNA, 19 bp, Vaccinia virus
aaatgaaatgccaaaggaa

SEQ ID NO: 1199 - DNA, 24 bp, Vaccinia virus
aggacaaatctaaaatgcaaagaa

SEQ ID NO: 1200 - DNA, 20 bp, Vaccinia virus
ggtgacttgagcttgagctc

SEQ ID NO: 1201 - DNA, 17 bp, Vaccinia virus
tgtttttaacatggatc

SEQ ID NO: 1202 - DNA, 21 bp, Vaccinia virus
aataaacttgctgatgcattt

SEQ ID NO: 1203 - DNA, 21 bp, Vaccinia virus
cttttacacgaccatttgata

SEQ ID NO: 1204 - DNA, 19 bp, Vaccinia virus
tttgtggtagcttatctta

SEQ ID NO: 1205 - DNA, 19 bp, Vaccinia virus
tatcttctgctctttcttc

SEQ ID NO: 1206 - DNA, 20 bp, Vaccinia virus
aggacttttatgggctcggc

SEQ ID NO: 1207 - DNA, 18 bp, Vaccinia virus
gctgcacaggaggccaga

SEQ ID NO: 1208 - DNA, 21 bp, Vaccinia virus
cattaaaaagtgggcaaagga

SEQ ID NO: 1209 - DNA, 19 bp, Vaccinia virus
atgatgaatttatcagcgt

SEQ ID NO: 1210 - DNA, 23 bp, Vaccinia virus
tccttatggggatgggtgccaca

SEQ ID NO: 1211 - DNA, 19 bp, Vaccinia virus
ataccattagaaaatacta

SEQ ID NO: 1212 - DNA, 18 bp, Vaccinia virus
tctgcatctactgacttg

SEQ ID NO: 1213 - DNA, 20 bp, Vaccinia virus
gagggccacactcttttcac

SEQ ID NO: 1214 - DNA, 22 bp, Vaccinia virus
atttattttttagtgatgagaa

SEQ ID NO: 1215 - DNA, 19 bp, Vaccinia virus
atagatgagaattttccgt

SEQ ID NO: 1216 - DNA, 21 bp, Vaccinia virus
cagagaacactatttttacat

SEQ ID NO: 1217 - DNA, 24 bp, Vaccinia virus
cagatgtggctactgacatatcta

SEQ ID NO: 1218 - DNA, 22 bp, Vaccinia virus
tggaaaagtcggcttgtaatca

SEQ ID NO: 1219 - DNA, 20 bp, Vaccinia virus
tggtggcagtaacatgcaac

SEQ ID NO: 1220 - DNA, 21 bp, Vaccinia virus
atcaacaaatcttcactgagc

SEQ ID NO: 1221 - DNA, 20 bp, Vaccinia virus
tggagtttgagactatggaa

SEQ ID NO: 1222 - DNA, 24 bp, Vaccinia virus
aaagagtgaatgtggtatatttct

SEQ ID NO: 1223 - DNA, 24 bp, Vaccinia virus
catgaggtaatattattattccca

SEQ ID NO: 1224 - DNA, 17 bp, Vaccinia virus
tatttttaacatgaatc

SEQ ID NO: 1225 - DNA, 15 bp, Vaccinia virus
cccctttctactcca

SEQ ID NO: 1226 - DNA, 20 bp, Vaccinia virus
tgtccatacactttgttgca

SEQ ID NO: 1227 - DNA, 23 bp, Vaccinia virus
aggccccagaatagctcctggac

SEQ ID NO: 1228 - DNA, 19 bp, Vaccinia virus
gagaaaatgctttgtagaa

SEQ ID NO: 1229 - DNA, 20 bp, Vaccinia virus
gtgactgtagttacttaaga

SEQ ID NO: 1230 - DNA, 18 bp, Vaccinia virus
tagctccctgagctgcca

SEQ ID NO: 1231 - DNA, 21 bp, Vaccinia virus
tgtcacttttttaaaacatga

SEQ ID NO: 1232 - DNA, 20 bp, Vaccinia virus
actaaccctggtctttccca

SEQ ID NO: 1233 - DNA, 16 bp, Vaccinia virus
gaaatggcctgtggaa

SEQ ID NO: 1234 - DNA, 17 bp, Vaccinia virus
agaaagagaagtgtttt

SEQ ID NO: 1235 - DNA, 22 bp, Vaccinia virus
ttctccacatgttgggtgtcca

SEQ ID NO: 1236 - DNA, 24 bp, Vaccinia virus
gtcccagggagatattagacctct

SEQ ID NO: 1237 - DNA, 18 bp, Vaccinia virus
gtggtcaaatatacatca

SEQ ID NO: 1238 - DNA, 18 bp, Vaccinia virus
gatgggatttatcagtgt

SEQ ID NO: 1239 - DNA, 24 bp, Vaccinia virus
aatatttgtattacttacaattaa

SEQ ID NO: 1240 - DNA, 17 bp, Vaccinia virus
tgttgataaatccatca

SEQ ID NO: 1241 - DNA, 19 bp, Vaccinia virus
atcagtggcttaaataata

SEQ ID NO: 1242 - DNA, 22 bp, Vaccinia virus
actgaaataaaaatgacttcac

SEQ ID NO: 1243 - DNA, 21 bp, Vaccinia virus
ttctgaaataatcagcagaaa

SEQ ID NO: 1244 - DNA, 22 bp, Vaccinia virus
aggatatgatggttacaatgaa

SEQ ID NO: 1245 - DNA, 18 bp, Vaccinia virus
atctctattctacattta

SEQ ID NO: 1246 - DNA, 20 bp, Vaccinia virus
tcccctctgattcccccatg

SEQ ID NO: 1247 - DNA, 21 bp, Vaccinia virus
ttctccacagcgggtgtcaca

SEQ ID NO: 1248 - DNA, 24 bp, Vaccinia virus
aagcaaggtacccccaaagatgtt

SEQ ID NO: 1249 - DNA, 20 bp, Vaccinia virus
cattaaaaagaaaccaggaa

SEQ ID NO: 1250 - DNA, 23 bp, Vaccinia virus
aatgtgtttactctctttccttc

SEQ ID NO: 1251 - DNA, 21 bp, Vaccinia virus
atttttatttttatgtctctc

SEQ ID NO: 1252 - DNA, 21 bp, Vaccinia virus
atgattattccagatactgta

SEQ ID NO: 1253 - DNA, 24 bp, Vaccinia virus
tctttaagtcgtgtttgtaaaaga

SEQ ID NO: 1254 - DNA, 19 bp, Vaccinia virus
atgggaaaaaaaacataga

SEQ ID NO: 1255 - DNA, 23 bp, Vaccinia virus
acaaaatgttatatagataatat

SEQ ID NO: 1256 - DNA, 22 bp, Vaccinia virus
tttgccaagaaaaaaaattcta

SEQ ID NO: 1257 - DNA, 20 bp, Vaccinia virus
agacatgggtgtgcacctta

SEQ ID NO: 1258 - DNA, 19 bp, Vaccinia virus
agcccttctgtaaaatatg

SEQ ID NO: 1259 - DNA, 21 bp, Vaccinia virus
ttggaaatatacagctctgtg

SEQ ID NO: 1260 - DNA, 18 bp, Vaccinia virus
atgtgtaaatacatagaa

SEQ ID NO: 1261 - DNA, 17 bp, Vaccinia virus
tctgagtagaaatgcgt

SEQ ID NO: 1262 - DNA, 22 bp, Vaccinia virus
tggggcagaagagcccaactcc

SEQ ID NO: 1263 - DNA, 18 bp, Vaccinia virus
tatgctacccttaataac

SEQ ID NO: 1264 - DNA, 20 bp, Vaccinia virus
ctaatgaaatggatttccca

SEQ ID NO: 1265 - DNA, 19 bp, Vaccinia virus
tgggacctaggctatctta

SEQ ID NO: 1266 - DNA, 20 bp, Vaccinia virus
agcctaaacacaaaattcat

SEQ ID NO: 1267 - DNA, 22 bp, Vaccinia virus
gttctgttgctatgaacacagc

SEQ ID NO: 1268 - DNA, 20 bp, Vaccinia virus
gtgctgaaatccacgccaga

SEQ ID NO: 1269 - DNA, 18 bp, Vaccinia virus
tagtcacactccctgccg

SEQ ID NO: 1270 - DNA, 26 bp, Vaccinia virus
aaagaacaatataattttcacatgaa

SEQ ID NO: 1271 - DNA, 23 bp, Vaccinia virus
tttttatctgcataaattttaca

SEQ ID NO: 1272 - DNA, 16 bp, Vaccinia virus
tgcatgtgtccactta

SEQ ID NO: 1273 - DNA, 25 bp, Vaccinia virus
ttgtgtagagttctaataccaaaga

SEQ ID NO: 1274 - DNA, 24 bp, Vaccinia virus
ataattaatggtactcctataatt

SEQ ID NO: 1275 - DNA, 18 bp, Vaccinia virus
gatggcttccgtgagaca

SEQ ID NO: 1276 - DNA, 25 bp, Vaccinia virus
aacaaacaaaaactgttgctatttc

SEQ ID NO: 1277 - DNA, 21 bp, Vaccinia virus
aatagtatttcagacactatg

SEQ ID NO: 1278 - DNA, 20 bp, Vaccinia virus
gtgagaagccaggctagaga

SEQ ID NO: 1279 - DNA, 22 bp, Vaccinia virus
ggaatcataatcatttgtattt

SEQ ID NO: 1280 - DNA, 22 bp, Vaccinia virus
tctgaaataatgggattagaaa

SEQ ID NO: 1281 - DNA, 18 bp, Vaccinia virus
tctgctataactctttca

SEQ ID NO: 1282 - DNA, 18 bp, Vaccinia virus
ctgaaaatattgggcatc

SEQ ID NO: 1283 - DNA, 18 bp, Vaccinia virus
agttgagagacaaaggta

SEQ ID NO: 1284 - DNA, 19 bp, Vaccinia virus
aaaattgaaaacctctttc

SEQ ID NO: 1285 - DNA, 20 bp, Vaccinia virus
taattggtagccatctcatg

SEQ ID NO: 1286 - DNA, 18 bp, Vaccinia virus
aacagaaagatcatttga

SEQ ID NO: 1287 - DNA, 20 bp, Vaccinia virus
ttggaaattaggagaaggaa

SEQ ID NO: 1288 - DNA, 22 bp, Vaccinia virus
aattaatggtaacgatgatgct

SEQ ID NO: 1289 - DNA, 20 bp, Vaccinia virus
ttcccctctaccctgcctcc

SEQ ID NO: 1290 - DNA, 17 bp, Vaccinia virus
tccagttagaacattga

SEQ ID NO: 1291 - DNA, 18 bp, Vaccinia virus
ggaaaaggaagaaagcca

SEQ ID NO: 1292 - DNA, 23 bp, Vaccinia virus
tcctgtttcccacctccttctcc

SEQ ID NO: 1293 - DNA, 17 bp, Vaccinia virus
aaaggtataattaaact

SEQ ID NO: 1294 - DNA, 17 bp, Vaccinia virus
aaaggacgccacatgag

SEQ ID NO: 1295 - DNA, 19 bp, Vaccinia virus
aactaactgtcaactgttg

SEQ ID NO: 1296 - DNA, 24 bp, Vaccinia virus
tattgctgttctctccctttcttc

SEQ ID NO: 1297 - DNA, 22 bp, Vaccinia virus
agagaaagacaactgttctgcg

SEQ ID NO: 1298 - DNA, 25 bp, Vaccinia virus
ccacttacttagatatctgcagata

SEQ ID NO: 1299 - DNA, 21 bp, Vaccinia virus
gttattcagttataagtaata

SEQ ID NO: 1300 - DNA, 15 bp, Vaccinia virus
cccctctatatcctc

SEQ ID NO: 1301 - DNA, 19 bp, Vaccinia virus
cactacaaacaaacaaacc

SEQ ID NO: 1302 - DNA, 20 bp, Vaccinia virus
attgtaattatgaaatacct

SEQ ID NO: 1303 - DNA, 20 bp, Vaccinia virus
cattaaatacatgccagaag

SEQ ID NO: 1304 - DNA, 25 bp, Vaccinia virus
ttctacatcagatgttgtcacttat

SEQ ID NO: 1305 - DNA, 16 bp, Vaccinia virus
aaatgaaaacagatca

SEQ ID NO: 1306 - DNA, 21 bp, Vaccinia virus
accatatagaaaaagattata

SEQ ID NO: 1307 - DNA, 21 bp, Vaccinia virus
ttcccctctctcattccccat

SEQ ID NO: 1308 - DNA, 20 bp, Vaccinia virus
agagaaagcaggcttttcta

SEQ ID NO: 1309 - DNA, 22 bp, Vaccinia virus
caaacaaagaaaaaattccaca

SEQ ID NO: 1310 - DNA, 23 bp, Vaccinia virus
ggaaaggacctgccccacatgaa

SEQ ID NO: 1311 - DNA, 26 bp, Vaccinia virus
gaaaagtacactttctactaaagatg

SEQ ID NO: 1312 - DNA, 19 bp, Vaccinia virus
cctgccaggctctccaatc

SEQ ID NO: 1313 - DNA, 20 bp, Vaccinia virus
caagatcataattttataga

SEQ ID NO: 1314 - DNA, 20 bp, Vaccinia virus
gtgactgtaatatactagag

SEQ ID NO: 1315 - DNA, 15 bp, Vaccinia virus
atatgccaaaaggaa

SEQ ID NO: 1316 - DNA, 18 bp, Vaccinia virus
cattttaaaaataaaggc

SEQ ID NO: 1317 - DNA, 19 bp, Vaccinia virus
cctgtttctcctccattca

SEQ ID NO: 1318 - DNA, 18 bp, Vaccinia virus
tctccggatggaatcaca

SEQ ID NO: 1319 - DNA, 19 bp, Vaccinia virus
atgatttgttccattttta

SEQ ID NO: 1320 - DNA, 21 bp, Vaccinia virus
aagtagcagttcaaaagatgt

SEQ ID NO: 1321 - DNA, 28 bp, Vaccinia virus
attctcacagatcagatcactccataga

SEQ ID NO: 1322 - DNA, 18 bp, Vaccinia virus
ctccatttatgtacccac

SEQ ID NO: 1323 - DNA, 24 bp, Vaccinia virus
aaagtgccattaacaaatgtatca

SEQ ID NO: 1324 - DNA, 18 bp, Vaccinia virus
tgaagtatggtgtgttca

SEQ ID NO: 1325 - DNA, 21 bp, Vaccinia virus
tccccagcatggatggccaca

SEQ ID NO: 1326 - DNA, 18 bp, Vaccinia virus
tgtacagtcagtactata

SEQ ID NO: 1327 - DNA, 24 bp, Vaccinia virus
ccaattatggaaacatacagtgga

SEQ ID NO: 1328 - DNA, 21 bp, Vaccinia virus
acagagaaccaaaacagctaa

SEQ ID NO: 1329 - DNA, 22 bp, Vaccinia virus
actgaaacacagcatggaatta

SEQ ID NO: 1330 - DNA, 17 bp, Vaccinia virus
gaaaagacaaaggttac

SEQ ID NO: 1331 - DNA, 17 bp, Vaccinia virus
taatggttggaacagaa

SEQ ID NO: 1332 - DNA, 18 bp, Vaccinia virus
agacatggttgttgcacc

SEQ ID NO: 1333 - DNA, 22 bp, Vaccinia virus
cgactcagcatacattttccca

SEQ ID NO: 1334 - DNA, 21 bp, Vaccinia virus
caatgctgtatgatactattt

SEQ ID NO: 1335 - DNA, 18 bp, Vaccinia virus
aacttgcattccactata

SEQ ID NO: 1336 - DNA, 18 bp, Vaccinia virus
cgtactgggtgcaatgaa

SEQ ID NO: 1337 - DNA, 18 bp, Vaccinia virus
tttgattcggatgttata

SEQ ID NO: 1338 - DNA, 17 bp, Vaccinia virus
gtgttcatgaagactta

SEQ ID NO: 1339 - DNA, 19 bp, Vaccinia virus
aaaggtatatgcaatgcta

SEQ ID NO: 1340 - DNA, 17 bp, Vaccinia virus
gctaaaactgtagaagc

SEQ ID NO: 1341 - DNA, 20 bp, Vaccinia virus
aaactgcaatttggttccac

SEQ ID NO: 1342 - DNA, 19 bp, Vaccinia virus
gacaaatacattatttctg

SEQ ID NO: 1343 - DNA, 19 bp, Vaccinia virus
gacatttttggcagagcat

SEQ ID NO: 1344 - DNA, 20 bp, Vaccinia virus
cacttagaagttattgagga

SEQ ID NO: 1345 - DNA, 23 bp, Vaccinia virus
atttaaataccccagccaagaaa

SEQ ID NO: 1346 - DNA, 19 bp, Vaccinia virus
tttcttaaaatatattctg

SEQ ID NO: 1347 - DNA, 24 bp, Vaccinia virus
gttaaatgttttctgtcttctgtt

SEQ ID NO: 1348 - DNA, 20 bp, Vaccinia virus
agctcctgggccggccctca

SEQ ID NO: 1349 - DNA, 19 bp, Vaccinia virus
aaaatattgaatgctttct

SEQ ID NO: 1350 - DNA, 22 bp, Vaccinia virus
aaaattcatagtaatcctgcca

SEQ ID NO: 1351 - DNA, 20 bp, Vaccinia virus
attggaaactgaaattcaga

SEQ ID NO: 1352 - DNA, 24 bp, Vaccinia virus
tattttcacaactactttctctct

SEQ ID NO: 1353 - DNA, 18 bp, Vaccinia virus
ttcaatagataccacgaa

SEQ ID NO: 1354 - DNA, 19 bp, Vaccinia virus
gacatttttggcagagcat

SEQ ID NO: 1355 - DNA, 18 bp, Vaccinia virus
atatttttaatcccgtta

SEQ ID NO: 1356 - DNA, 23 bp, Vaccinia virus
tgatttatgataactatacattg

SEQ ID NO: 1357 - DNA, 18 bp, Vaccinia virus
gatgccagagagaactta

SEQ ID NO: 1358 - DNA, 19 bp, Vaccinia virus
ggacaccagaaaatttgta

SEQ ID NO: 1359 - DNA, 15 bp, Vaccinia virus
actagcagaactctt

SEQ ID NO: 1360 - DNA, 25 bp, Vaccinia virus
agatatgtttagtttagactttata

SEQ ID NO: 1361 - DNA, 18 bp, Vaccinia virus
tccatttaaaatacattc

SEQ ID NO: 1362 - DNA, 21 bp, Vaccinia virus
tctctgctgctggacccaaga

SEQ ID NO: 1363 - DNA, 18 bp, Vaccinia virus
agaatggagacttataca

SEQ ID NO: 1364 - DNA, 20 bp, Vaccinia virus
ctgacaaattaaggaggtta

SEQ ID NO: 1365 - DNA, 18 bp, Vaccinia virus
aaacagtatcaatgttga

SEQ ID NO: 1366 - DNA, 18 bp, Vaccinia virus
aggagaatcaattcttca

SEQ ID NO: 1367 - DNA, 18 bp, Vaccinia virus
ttgaccaaaaattttaca

SEQ ID NO: 1368 - DNA, 18 bp, Vaccinia virus
cgtgataaatatatggac

SEQ ID NO: 1369 - DNA, 19 bp, Vaccinia virus
taatttcaaatagaatatg

SEQ ID NO: 1370 - DNA, 20 bp, Vaccinia virus
caagatcataggcctcagac

SEQ ID NO: 1371 - DNA, 18 bp, Vaccinia virus
tataataaattatgtgca

SEQ ID NO: 1372 - DNA, 18 bp, Vaccinia virus
aaaaaaaatacatgggaa

SEQ ID NO: 1373 - DNA, 21 bp, Vaccinia virus
aagcagttgagtaacagcaac

SEQ ID NO: 1374 - DNA, 21 bp, Vaccinia virus
tgaagtgtagatttgtattta

SEQ ID NO: 1375 - DNA, 19 bp, Vaccinia virus
cgttaggaatccattctca

SEQ ID NO: 1376 - DNA, 21 bp, Vaccinia virus
tgtaactcaagcatcaattca

SEQ ID NO: 1377 - DNA, 19 bp, Vaccinia virus
aaaaaaagttacagaaata

SEQ ID NO: 1378 - DNA, 19 bp, Vaccinia virus
aaaaaaagttacagaaata

SEQ ID NO: 1379 - DNA, 19 bp, Vaccinia virus
aaaaaaagttacagaaata

SEQ ID NO: 1380 - DNA, 23 bp, Vaccinia virus
gccatgagcacaaaattatggta

SEQ ID NO: 1381 - DNA, 23 bp, Vaccinia virus
gccatgagcacaaaattatggta

SEQ ID NO: 1382 - DNA, 23 bp, Vaccinia virus
gccatgagcacaaaattatggta

SEQ ID NO: 1383 - DNA, 23 bp, Vaccinia virus
gccatgagcacaaaattatggta

SEQ ID NO: 1384 - DNA, 23 bp, Vaccinia virus
gccatgagcacaaaattatggta

SEQ ID NO: 1385 - DNA, 23 bp, Vaccinia virus
gccatgagcacaaaattatggta

SEQ ID NO: 1386 - DNA, 23 bp, Vaccinia virus
gccatgagcacaaaattatggta

SEQ ID NO: 1387 - DNA, 23 bp, Vaccinia virus
gccatgagcacaaaattatggta

SEQ ID NO: 1388 - DNA, 23 bp, Vaccinia virus
gccatgagcacaaaattatggta

SEQ ID NO: 1389 - DNA, 23 bp, Vaccinia virus
gccatgagcacaaaattatggta

SEQ ID NO: 1390 - DNA, 18 bp, Vaccinia virus
ctaatgaagtgggctcca

SEQ ID NO: 1391 - DNA, 23 bp, Vaccinia virus
gccatgagcacaaaattatggta

SEQ ID NO: 1392 - DNA, 22 bp, Vaccinia virus
tggaagttagcactctagggaa

SEQ ID NO: 1393 - DNA, 17 bp, Vaccinia virus
ttctactttgccacaga

SEQ ID NO: 1394 - DNA, 19 bp, Vaccinia virus
aaaggtatatgtgataaat

SEQ ID NO: 1395 - DNA, 17 bp, Vaccinia virus
aagggaatttttttgta

SEQ ID NO: 1396 - DNA, 20 bp, Vaccinia virus
cctgaatgaatgggtgtcac

SEQ ID NO: 1397 - DNA, 16 bp, Vaccinia virus
agtcacagaaggttcc

SEQ ID NO: 1398 - DNA, 21 bp, Vaccinia virus
gtgtgagattcgtaccgaaga

SEQ ID NO: 1399 - DNA, 18 bp, Vaccinia virus
tgtgtgaaatctttcaag

SEQ ID NO: 1400 - DNA, 19 bp, Vaccinia virus
aaaactagtatgtggaaag

SEQ ID NO: 1401 - DNA, 18 bp, Vaccinia virus
gacctctatatcctggtg

SEQ ID NO: 1402 - DNA, 18 bp, Vaccinia virus
ttccatcctcatcacaag

SEQ ID NO: 1403 - DNA, 20 bp, Vaccinia virus
atttattctgaacgggagaa

SEQ ID NO: 1404 - DNA, 22 bp, Vaccinia virus
tattcccagcctttctttcttc

SEQ ID NO: 1405 - DNA, 19 bp, Vaccinia virus
agaacagagattttacagt

SEQ ID NO: 1406 - DNA, 17 bp, Vaccinia virus
ttctcatagattttgta

SEQ ID NO: 1407 - DNA, 20 bp, Vaccinia virus
ctgccaagcctggtctgtca

SEQ ID NO: 1408 - DNA, 19 bp, Vaccinia virus
ataatggtaataggaaaac

SEQ ID NO: 1409 - DNA, 20 bp, Vaccinia virus
aggtgaaaggcatctttctg

SEQ ID NO: 1410 - DNA, 17 bp, Vaccinia virus
tagtcacagtaatcccc

SEQ ID NO: 1411 - DNA, 22 bp, Vaccinia virus
atattgtagaaggaaacaccaa

SEQ ID NO: 1412 - DNA, 18 bp, Vaccinia virus
aagggatcagaaattcaa

SEQ ID NO: 1413 - DNA, 19 bp, Vaccinia virus
tgccctcaagcttatacta

SEQ ID NO: 1414 - DNA, 19 bp, Vaccinia virus
ttattcctctctgtccaca

SEQ ID NO: 1415 - DNA, 17 bp, Vaccinia virus
tcctgtttcccacccag

SEQ ID NO: 1416 - DNA, 24 bp, Vaccinia virus
ctatagatgatattttaaattgaa

SEQ ID NO: 1417 - DNA, 22 bp, Vaccinia virus
aaaatactagcttattttctga

SEQ ID NO: 1418 - DNA, 19 bp, Vaccinia virus
ttctgggtctgatctgtca

SEQ ID NO: 1419 - DNA, 18 bp, Vaccinia virus
agatctagttttatctta

SEQ ID NO: 1420 - DNA, 18 bp, Vaccinia virus
tattctcttttttttctc

SEQ ID NO: 1421 - DNA, 21 bp, Vaccinia virus
ccacaagcatacctattaaga

SEQ ID NO: 1422 - DNA, 19 bp, Vaccinia virus
gtgaggaagactttaccaa

SEQ ID NO: 1423 - DNA, 21 bp, Vaccinia virus
agatgcaaatgtattactgta

SEQ ID NO: 1424 - DNA, 18 bp, Vaccinia virus
aaaggacaaggacatgag

SEQ ID NO: 1425 - DNA, 20 bp, Vaccinia virus
tgcgtgttttccaccaaaga

SEQ ID NO: 1426 - DNA, 19 bp, Vaccinia virus
ttgttccccctctctcttt

SEQ ID NO: 1427 - DNA, 19 bp, Vaccinia virus
cttacagaagagtctctaa

SEQ ID NO: 1428 - DNA, 19 bp, Vaccinia virus
aaaagtcaaggcatcattt

SEQ ID NO: 1429 - DNA, 21 bp, Vaccinia virus
gtatgttgaatgtggtcccag

SEQ ID NO: 1430 - DNA, 22 bp, Vaccinia virus
tggtaatattctatgcaactat

SEQ ID NO: 1431 - DNA, 20 bp, Vaccinia virus
aaaatacagcttcttcctga

SEQ ID NO: 1432 - DNA, 19 bp, Vaccinia virus
agtgtttatttcagttttc

SEQ ID NO: 1433 - DNA, 17 bp, Vaccinia virus
ccattgcagattcgagt

SEQ ID NO: 1434 - DNA, 20 bp, Vaccinia virus
gaagtgtcaaaatatgagaa

SEQ ID NO: 1435 - DNA, 21 bp, Vaccinia virus
gatacatcactgaaatttgga

SEQ ID NO: 1436 - DNA, 18 bp, Vaccinia virus
catggagatgaaatgcct

SEQ ID NO: 1437 - DNA, 19 bp, Vaccinia virus
aacttcactctacactata

SEQ ID NO: 1438 - DNA, 19 bp, Vaccinia virus
tagaggtaagactttaata

SEQ ID NO: 1439 - DNA, 24 bp, Vaccinia virus
gttataaacattcttatgtgtaat

SEQ ID NO: 1440 - DNA, 23 bp, Vaccinia virus
gccagggggcatctccaaaggaa

SEQ ID NO: 1441 - DNA, 23 bp, Vaccinia virus
gacgtgaccactggacagttatt

SEQ ID NO: 1442 - DNA, 18 bp, Vaccinia virus
aggaagatattttcagat

SEQ ID NO: 1443 - DNA, 23 bp, Vaccinia virus
agaattgggttttattaatatta

SEQ ID NO: 1444 - DNA, 18 bp, Vaccinia virus
tgattttcataccaaaga

SEQ ID NO: 1445 - DNA, 20 bp, Vaccinia virus
aagtggataaacagaacatt

SEQ ID NO: 1446 - DNA, 24 bp, Vaccinia virus
aactaaatttctcaactgttatga

SEQ ID NO: 1447 - DNA, 20 bp, Vaccinia virus
ctaacaggaaacacttctca

SEQ ID NO: 1448 - DNA, 18 bp, Vaccinia virus
caggctttgttggtaaaa

SEQ ID NO: 1449 - DNA, 24 bp, Vaccinia virus
tgaaaaaggaagttggttatgcca

SEQ ID NO: 1450 - DNA, 19 bp, Vaccinia virus
tgtattctgtaacagatta

SEQ ID NO: 1451 - DNA, 23 bp, Vaccinia virus
ctgtcaaaatatacaccacttat

SEQ ID NO: 1452 - DNA, 20 bp, Vaccinia virus
tactgcatgcatcacttctg

SEQ ID NO: 1453 - DNA, 20 bp, Vaccinia virus
aggactttcataccgacaac

SEQ ID NO: 1454 - DNA, 19 bp, Vaccinia virus
tggagaggaagaaacgcta

SEQ ID NO: 1455 - DNA, 18 bp, Vaccinia virus
agtactaaaattaatgca

SEQ ID NO: 1456 - DNA, 18 bp, Vaccinia virus
tattacactgtatttgta

SEQ ID NO: 1457 - DNA, 18 bp, Vaccinia virus
tattacactgtatttgta

SEQ ID NO: 1458 - DNA, 18 bp, Vaccinia virus
tattacactgtatttgta

SEQ ID NO: 1459 - DNA, 22 bp, Vaccinia virus
aaataatttttaaggtgtatca

SEQ ID NO: 1460 - DNA, 22 bp, Vaccinia virus
gatctaatctgatcatttaata

SEQ ID NO: 1461 - DNA, 19 bp, Vaccinia virus
tatctatatctgtctatca

SEQ ID NO: 1462 - DNA, 18 bp, Vaccinia virus
attggctgacagccaatt

SEQ ID NO: 1463 - DNA, 17 bp, Vaccinia virus
tatttgtgttgtccatt

SEQ ID NO: 1464 - DNA, 18 bp, Vaccinia virus
atgaccctgaaatgactg

SEQ ID NO: 1465 - DNA, 20 bp, Vaccinia virus
gagattgggaacaaaaatat

SEQ ID NO: 1466 - DNA, 20 bp, Vaccinia virus
aataaacttggtacgtattt

SEQ ID NO: 1467 - DNA, 17 bp, Vaccinia virus
acagcattacaaaatcc

SEQ ID NO: 1468 - DNA, 19 bp, Vaccinia virus
tattgaaaggagctaatgc

SEQ ID NO: 1469 - DNA, 18 bp, Vaccinia virus
gagtattctttatattca

SEQ ID NO: 1470 - DNA, 20 bp, Vaccinia virus
catgcacaccctctctgata

SEQ ID NO: 1471 - DNA, 22 bp, Vaccinia virus
tatttcctttctctttctctct

SEQ ID NO: 1472 - DNA, 18 bp, Vaccinia virus
ctattgagtagtattcta

SEQ ID NO: 1473 - DNA, 18 bp, Vaccinia virus
gtcccaaaaaactgtagt

SEQ ID NO: 1474 - DNA, 17 bp, Vaccinia virus
acctgatgtattgctct

SEQ ID NO: 1475 - DNA, 17 bp, Vaccinia virus
gtttcttgaaagactta

SEQ ID NO: 1476 - DNA, 21 bp, Vaccinia virus
tggaattcatactctgtggaa

SEQ ID NO: 1477 - DNA, 18 bp, Vaccinia virus
tctgccaataaccacaaa

SEQ ID NO: 1478 - DNA, 19 bp, Vaccinia virus
ggaaaagtgttgcctgcca

SEQ ID NO: 1479 - DNA, 18 bp, Vaccinia virus
gtacagttaacttataga

SEQ ID NO: 1480 - DNA, 17 bp, Vaccinia virus
cgttgaagcacaactaa

SEQ ID NO: 1481 - DNA, 17 bp, Vaccinia virus
gaagagccattacatgc

SEQ ID NO: 1482 - DNA, 18 bp, Vaccinia virus
gtgacggagtagaagctt

SEQ ID NO: 1483 - DNA, 20 bp, Vaccinia virus
tgacagtggtagaataaagg

SEQ ID NO: 1484 - DNA, 17 bp, Vaccinia virus
ctcaccccatcaccttg

SEQ ID NO: 1485 - DNA, 19 bp, Vaccinia virus
acagcttagaagtgctata

SEQ ID NO: 1486 - DNA, 19 bp, Vaccinia virus
aagtaaaatgcaaagatgt

SEQ ID NO: 1487 - DNA, 17 bp, Vaccinia virus
tagaagtgaagacctta

SEQ ID NO: 1488 - DNA, 23 bp, Vaccinia virus
tattcttattttcccctctcttt

SEQ ID NO: 1489 - DNA, 19 bp, Vaccinia virus
agaaagaatacttttttat

SEQ ID NO: 1490 - DNA, 20 bp, Vaccinia virus
agaggaaactttcacatgaa

SEQ ID NO: 1491 - DNA, 17 bp, Vaccinia virus
atgaccctgagatcgtg

SEQ ID NO: 1492 - DNA, 21 bp, Vaccinia virus
taatagtcccatatctgtaat

SEQ ID NO: 1493 - DNA, 20 bp, Vaccinia virus
cccgtctacccctccagtca

SEQ ID NO: 1494 - DNA, 18 bp, Vaccinia virus
ccaagaaaaacagtctca

SEQ ID NO: 1495 - DNA, 17 bp, Vaccinia virus
tttattctctttcttct

SEQ ID NO: 1496 - DNA, 23 bp, Vaccinia virus
taattccaagaagtttttatagt

SEQ ID NO: 1497 - DNA, 18 bp, Vaccinia virus
ttaatatgagacatactg

SEQ ID NO: 1498 - DNA, 20 bp, Vaccinia virus
ccattacaacagctccagga

SEQ ID NO: 1499 - DNA, 20 bp, Vaccinia virus
ttcccctctaccagcctcca

SEQ ID NO: 1500 - DNA, 19 bp, Vaccinia virus
gaaatatctacaggtatat

SEQ ID NO: 1501 - DNA, 18 bp, Vaccinia virus
taggaactaaactatgcc

SEQ ID NO: 1502 - DNA, 18 bp, Vaccinia virus
agtgtgacttttcccaca

SEQ ID NO: 1503 - DNA, 17 bp, Vaccinia virus
aagatcatcgcaccccc

SEQ ID NO: 1504 - DNA, 20 bp, Vaccinia virus
tagtcgatggaagactttaa

SEQ ID NO: 1505 - DNA, 22 bp, Vaccinia virus
aaaattcagttcctccattaca

SEQ ID NO: 1506 - DNA, 23 bp, Vaccinia virus
cagtgtgcaattagtcattgaca

SEQ ID NO: 1507 - DNA, 18 bp, Vaccinia virus
tgggttgttgcggacatc

SEQ ID NO: 1508 - DNA, 16 bp, Vaccinia virus
gtacaataacaactca

SEQ ID NO: 1509 - DNA, 20 bp, Vaccinia virus
aatgacgtcagaatcatttg

SEQ ID NO: 1510 - DNA, 18 bp, Vaccinia virus
agaaagagaagactttaa

SEQ ID NO: 1511 - DNA, 16 bp, Vaccinia virus
tcccctctactacccc

SEQ ID NO: 1512 - DNA, 22 bp, Vaccinia virus
cgtcatattctcaacagtttct

SEQ ID NO: 1513 - DNA, 17 bp, Vaccinia virus
atctcaatttacactag

SEQ ID NO: 1514 - DNA, 27 bp, Vaccinia virus
tccaaagttaattgtaaacatcatcag

SEQ ID NO: 1515 - DNA, 20 bp, Vaccinia virus
gaaataaaattaaaggtata

SEQ ID NO: 1516 - DNA, 21 bp, Vaccinia virus
acaaatgggtattcttttcat

SEQ ID NO: 1517 - DNA, 23 bp, Vaccinia virus
gaaaagataattacttacatgaa

SEQ ID NO: 1518 - DNA, 20 bp, Vaccinia virus
agaaaggtaaatctttttac

SEQ ID NO: 1519 - DNA, 17 bp, Vaccinia virus
tctactaaaactacaaa

SEQ ID NO: 1520 - DNA, 20 bp, Vaccinia virus
actgttattactgttacctg

SEQ ID NO: 1521 - DNA, 22 bp, Vaccinia virus
ctcaacagtaattccactccca

SEQ ID NO: 1522 - DNA, 19 bp, Vaccinia virus
tgaagtatgtttgtattta

SEQ ID NO: 1523 - DNA, 20 bp, Vaccinia virus
tattctatcctctcctcttc

SEQ ID NO: 1524 - DNA, 21 bp, Vaccinia virus
cagatgtggtcacctcagtcc

SEQ ID NO: 1525 - DNA, 23 bp, Vaccinia virus
ccactatagcaagaaataaaggc

SEQ ID NO: 1526 - DNA, 25 bp, Vaccinia virus
aaaattgtatattttttccatctca

SEQ ID NO: 1527 - DNA, 19 bp, Vaccinia virus
actagaatctcttaagtat

SEQ ID NO: 1528 - DNA, 19 bp, Vaccinia virus
tcttttaaaatacatttta

SEQ ID NO: 1529 - DNA, 17 bp, Vaccinia virus
agaaattaagactttaa

SEQ ID NO: 1530 - DNA, 21 bp, Vaccinia virus
tggtacagtatagtaccatta

SEQ ID NO: 1531 - DNA, 17 bp, Vaccinia virus
ctgaaaaagccagaggc

SEQ ID NO: 1532 - DNA, 23 bp, Vaccinia virus
tatctctgttttgggagacaggt

SEQ ID NO: 1533 - DNA, 21 bp, Vaccinia virus
aacaaaccacaaacggatgtg

SEQ ID NO: 1534 - DNA, 19 bp, Vaccinia virus
ttcttaaacaaaccacaaa

SEQ ID NO: 1535 - DNA, 18 bp, Vaccinia virus
gatctcaaaacagtgcta

SEQ ID NO: 1536 - DNA, 20 bp, Vaccinia virus
ttccctgcaatgggtgcaca

SEQ ID NO: 1537 - DNA, 21 bp, Vaccinia virus
tattttcacaatcctctcttc

SEQ ID NO: 1538 - DNA, 24 bp, Vaccinia virus
gacactgtttacgtccctcccact

SEQ ID NO: 1539 - DNA, 18 bp, Vaccinia virus
tccccccccatcacctta

SEQ ID NO: 1540 - DNA, 18 bp, Vaccinia virus
agtcacagggaagtgctg

SEQ ID NO: 1541 - DNA, 20 bp, Vaccinia virus
ccaccgggacactccccctg

SEQ ID NO: 1542 - DNA, 22 bp, Vaccinia virus
acttttaaggtaactgggatga

SEQ ID NO: 1543 - DNA, 22 bp, Vaccinia virus
aattgtgatgtcctagtcctac

SEQ ID NO: 1544 - DNA, 22 bp, Vaccinia virus
cagttgggcctaatcctgcctc

SEQ ID NO: 1545 - DNA, 21 bp, Vaccinia virus
tgatgtcctagtcctaccact

SEQ ID NO: 1546 - DNA, 17 bp, Vaccinia virus
aagggtagagataaact

SEQ ID NO: 1547 - DNA, 21 bp, Vaccinia virus
aggctgccataacaaaatacc

SEQ ID NO: 1548 - DNA, 17 bp, Vaccinia virus
gaaatgacattcacatg

SEQ ID NO: 1549 - DNA, 17 bp, Vaccinia virus
gaaatgacattcacatg

SEQ ID NO: 1550 - DNA, 17 bp, Vaccinia virus
gaaatgacattcacatg

SEQ ID NO: 1551 - DNA, 17 bp, Vaccinia virus
gaaatgacattcacatg

SEQ ID NO: 1552 - DNA, 17 bp, Vaccinia virus
gaaatgacattcacatg

SEQ ID NO: 1553 - DNA, 18 bp, Vaccinia virus
tctatttcataccacaaa

SEQ ID NO: 1554 - DNA, 20 bp, Vaccinia virus
tcttgtaatagttaaacctc

SEQ ID NO: 1555 - DNA, 19 bp, Vaccinia virus
atggacttcttcatctgta

SEQ ID NO: 1556 - DNA, 19 bp, Vaccinia virus
gccaaagacttagaagcta

SEQ ID NO: 1557 - DNA, 21 bp, Vaccinia virus
agaacatcactgaaaatgcct

SEQ ID NO: 1558 - DNA, 18 bp, Vaccinia virus
atgttgatttttaaatta

SEQ ID NO: 1559 - DNA, 20 bp, Vaccinia virus
cagtatcaataaatcacttc

SEQ ID NO: 1560 - DNA, 19 bp, Vaccinia virus
cggcattattttattccca

SEQ ID NO: 1561 - DNA, 18 bp, Vaccinia virus
ggaaaaggaagaaagcca

SEQ ID NO: 1562 - DNA, 19 bp, Vaccinia virus
atgttattccccattatca

SEQ ID NO: 1563 - DNA, 18 bp, Vaccinia virus
tctagtggatgagaatca

SEQ ID NO: 1564 - DNA, 21 bp, Vaccinia virus
tgtgactttgccccaaatttg

SEQ ID NO: 1565 - DNA, 21 bp, Vaccinia virus
taaaaaaaggagcaaaagtat

SEQ ID NO: 1566 - DNA, 25 bp, Vaccinia virus
agagaaagtttgtaaaattccttac

SEQ ID NO: 1567 - DNA, 18 bp, Vaccinia virus
catgggaagtgaaagctg

SEQ ID NO: 1568 - DNA, 18 bp, Vaccinia virus
gccaatgggaacttctca

SEQ ID NO: 1569 - DNA, 19 bp, Vaccinia virus
aatctataaaacaaaacaa

SEQ ID NO: 1570 - DNA, 19 bp, Vaccinia virus
aaaaccttgcattccatca

SEQ ID NO: 1571 - DNA, 20 bp, Vaccinia virus
tttgccaaaagcagtccttc

SEQ ID NO: 1572 - DNA, 21 bp, Vaccinia virus
agttggacacacccctcctcg

SEQ ID NO: 1573 - DNA, 23 bp, Vaccinia virus
atggagaaaaagcagggatgcta

SEQ ID NO: 1574 - DNA, 20 bp, Vaccinia virus
ggaaactgtaacaggacatt

SEQ ID NO: 1575 - DNA, 19 bp, Vaccinia virus
aaaggcagagaggccagga

SEQ ID NO: 1576 - DNA, 25 bp, Vaccinia virus
acacttcagccgcagccaaatagca

SEQ ID NO: 1577 - DNA, 19 bp, Vaccinia virus
ttctgaataaatttacagt

SEQ ID NO: 1578 - DNA, 18 bp, Vaccinia virus
agaaaactagtgatacca

SEQ ID NO: 1579 - DNA, 22 bp, Vaccinia virus
attcttatgtttttctcttttc

SEQ ID NO: 1580 - DNA, 18 bp, Vaccinia virus
agatgtagaactttaata

SEQ ID NO: 1581 - DNA, 24 bp, Vaccinia virus
atgacagtatctgcagatactata

SEQ ID NO: 1582 - DNA, 21 bp, Vaccinia virus
attatgcattactccacatcc

SEQ ID NO: 1583 - DNA, 19 bp, Vaccinia virus
ggaaacaaacttcaggtca

SEQ ID NO: 1584 - DNA, 23 bp, Vaccinia virus
aaaatggtattattaataccata

SEQ ID NO: 1585 - DNA, 18 bp, Vaccinia virus
aagaaatgtctgtacaaa

SEQ ID NO: 1586 - DNA, 21 bp, Vaccinia virus
actgatatattataaactaac

SEQ ID NO: 1587 - DNA, 20 bp, Vaccinia virus
tagtcacgcggcacgcgccg

SEQ ID NO: 1588 - DNA, 18 bp, Vaccinia virus
atgatgtatattatcgat

SEQ ID NO: 1589 - DNA, 18 bp, Vaccinia virus
tctgcattgaactagaaa

SEQ ID NO: 1590 - DNA, 20 bp, Vaccinia virus
ttctatccggtagtcacaaa

SEQ ID NO: 1591 - DNA, 17 bp, Vaccinia virus
aaacaaatgagatggac

SEQ ID NO: 1592 - DNA, 20 bp, Vaccinia virus
ccattatacagtctttctca

SEQ ID NO: 1593 - DNA, 20 bp, Vaccinia virus
caaaagaaaaaaaattctcc

SEQ ID NO: 1594 - DNA, 22 bp, Vaccinia virus
acaaattcgtaagtatcctcta

SEQ ID NO: 1595 - DNA, 21 bp, Vaccinia virus
aatctacagacattaaacaat

SEQ ID NO: 1596 - DNA, 23 bp, Vaccinia virus
aagaaagttttatttgtatttta

SEQ ID NO: 1597 - DNA, 21 bp, Vaccinia virus
ttcccctaagttctattccat

SEQ ID NO: 1598 - DNA, 18 bp, Vaccinia virus
gctaacaaaagcttctca

SEQ ID NO: 1599 - DNA, 21 bp, Vaccinia virus
aatgcctggcaaattacctga

SEQ ID NO: 1600 - DNA, 21 bp, Vaccinia virus
atagatgatgaaaagctgtta

SEQ ID NO: 1601 - DNA, 21 bp, Vaccinia virus
agaaagatttaaagtatttta

SEQ ID NO: 1602 - DNA, 20 bp, Vaccinia virus
ggtgggatcaacatacattg

SEQ ID NO: 1603 - DNA, 19 bp, Vaccinia virus
caaagtgatggaaccctca

SEQ ID NO: 1604 - DNA, 21 bp, Vaccinia virus
aggactttcccgtccacacac

SEQ ID NO: 1605 - DNA, 18 bp, Vaccinia virus
atagatgaattagtaagc

SEQ ID NO: 1606 - DNA, 16 bp, Vaccinia virus
gaattggtctgtggaa

SEQ ID NO: 1607 - DNA, 19 bp, Vaccinia virus
tacctcaagtatcaattca

SEQ ID NO: 1608 - DNA, 23 bp, Vaccinia virus
gaaatataattcttaatatcata

SEQ ID NO: 1609 - DNA, 19 bp, Vaccinia virus
gacagcgccaataacaata

SEQ ID NO: 1610 - DNA, 24 bp, Vaccinia virus
acttctatatagagatagacttac

SEQ ID NO: 1611 - DNA, 20 bp, Vaccinia virus
atgaatgaaaaatccatcca

SEQ ID NO: 1612 - DNA, 19 bp, Vaccinia virus
tgcccatatgtccatttat

SEQ ID NO: 1613 - DNA, 19 bp, Vaccinia virus
atacagatagaaacataga

SEQ ID NO: 1614 - DNA, 18 bp, Vaccinia virus
gctaatgatgacatctca

SEQ ID NO: 1615 - DNA, 17 bp, Vaccinia virus
ggatcatttgtattttg

SEQ ID NO: 1616 - DNA, 21 bp, Vaccinia virus
aatagtggtcagaaaaatact

SEQ ID NO: 1617 - DNA, 23 bp, Vaccinia virus
ttgtacaatattttgtacaaaga

SEQ ID NO: 1618 - DNA, 17 bp, Vaccinia virus
ttctactcaactacaaa

SEQ ID NO: 1619 - DNA, 21 bp, Vaccinia virus
aataatgtcattctcaattaa

SEQ ID NO: 1620 - DNA, 19 bp, Vaccinia virus
gctgcgtattatttctata

SEQ ID NO: 1621 - DNA, 22 bp, Vaccinia virus
agcactgtggttgagtaacatc

SEQ ID NO: 1622 - DNA, 18 bp, Vaccinia virus
tatgttgaattgatctag

SEQ ID NO: 1623 - DNA, 18 bp, Vaccinia virus
atgtcagtaggagactta

SEQ ID NO: 1624 - DNA, 18 bp, Vaccinia virus
gtttacatccttcccact

SEQ ID NO: 1625 - DNA, 16 bp, Vaccinia virus
ttctcatagaacacca

SEQ ID NO: 1626 - DNA, 17 bp, Vaccinia virus
tctgctgtcactcaagg

SEQ ID NO: 1627 - DNA, 18 bp, Vaccinia virus
ttttattccctttcctct

SEQ ID NO: 1628 - DNA, 18 bp, Vaccinia virus
ctctggcaaagtcttcaa

SEQ ID NO: 1629 - DNA, 19 bp, Vaccinia virus
ccactccggagatccgggt

SEQ ID NO: 1630 - DNA, 23 bp, Vaccinia virus
aatacaggaaatagataaacatg

SEQ ID NO: 1631 - DNA, 20 bp, Vaccinia virus
ttctggcctccagaactaga

SEQ ID NO: 1632 - DNA, 16 bp, Vaccinia virus
acgatggggatacatt

SEQ ID NO: 1633 - DNA, 16 bp, Vaccinia virus
tgatgccaactcagac

SEQ ID NO: 1634 - DNA, 21 bp, Vaccinia virus
ggcccccagtgctctgtggga

SEQ ID NO: 1635 - DNA, 16 bp, Vaccinia virus
atttctggtgaattac

SEQ ID NO: 1636 - DNA, 20 bp, Vaccinia virus
cttttaaatgaaaaagatta

SEQ ID NO: 1637 - DNA, 16 bp, Vaccinia virus
tatgctgaagactggt

SEQ ID NO: 1638 - DNA, 17 bp, Vaccinia virus
tcatttcaaaccacaaa

SEQ ID NO: 1639 - DNA, 17 bp, Vaccinia virus
tattcctctttcttttc

SEQ ID NO: 1640 - DNA, 19 bp, Vaccinia virus
tttccagaagggtctccaa

SEQ ID NO: 1641 - DNA, 19 bp, Vaccinia virus
ggactcttatgtcactgca

SEQ ID NO: 1642 - DNA, 16 bp, Vaccinia virus
atgttacaactacttt

SEQ ID NO: 1643 - DNA, 21 bp, Vaccinia virus
aataaacttgctgatgcattt

SEQ ID NO: 1644 - DNA, 24 bp, Vaccinia virus
ttaaatatgcatctggcccaggaa

SEQ ID NO: 1645 - DNA, 24 bp, Vaccinia virus
ttaaatatgcatctggcccaggaa

SEQ ID NO: 1646 - DNA, 24 bp, Vaccinia virus
ttaaatatgcatctggcccaggaa

SEQ ID NO: 1647 - DNA, 18 bp, Vaccinia virus
ccgcagcgcgcggaggaa

SEQ ID NO: 1648 - DNA, 17 bp, Vaccinia virus
tcttggaagaatctcaa

SEQ ID NO: 1649 - DNA, 19 bp, Vaccinia virus
ccttaaaacacacatggga

SEQ ID NO: 1650 - DNA, 18 bp, Vaccinia virus
ttttgttcgcctctcttc

SEQ ID NO: 1651 - DNA, 21 bp, Vaccinia virus
tattttccaagtttctctctc

SEQ ID NO: 1652 - DNA, 21 bp, Vaccinia virus
agaaagatttaaagtatttta

SEQ ID NO: 1653 - DNA, 16 bp, Vaccinia virus
cgaaaattaaacctct

SEQ ID NO: 1654 - DNA, 18 bp, Vaccinia virus
aaaatacataggaaaaga

SEQ ID NO: 1655 - DNA, 20 bp, Vaccinia virus
aaaatgaaaccctgtagcca

SEQ ID NO: 1656 - DNA, 20 bp, Vaccinia virus
aaaacaattcttcattcaga

SEQ ID NO: 1657 - DNA, 17 bp, Vaccinia virus
ttctggtataccacaaa

SEQ ID NO: 1658 - DNA, 20 bp, Vaccinia virus
gaggcacttaatacatgtat

SEQ ID NO: 1659 - DNA, 19 bp, Vaccinia virus
aagtattaaaaccaaggaa

SEQ ID NO: 1660 - DNA, 19 bp, Vaccinia virus
acaaataaggaaaacagct

SEQ ID NO: 1661 - DNA, 22 bp, Vaccinia virus
aaaaggcagaaacatacctttg

SEQ ID NO: 1662 - DNA, 16 bp, Vaccinia virus
tctctggagtcttcaa

SEQ ID NO: 1663 - DNA, 18 bp, Vaccinia virus
ttcacaagccattaggga

SEQ ID NO: 1664 - DNA, 18 bp, Vaccinia virus
gatcaaaatcatttgata

SEQ ID NO: 1665 - DNA, 22 bp, Vaccinia virus
agctgcaaaaacgagctcttca

SEQ ID NO: 1666 - DNA, 21 bp, Vaccinia virus
attgaaaggggaaatgtgtca

SEQ ID NO: 1667 - DNA, 18 bp, Vaccinia virus
gcaaaaacgagctcttca

SEQ ID NO: 1668 - DNA, 19 bp, Vaccinia virus
atcagttcgcctccattcc

SEQ ID NO: 1669 - DNA, 17 bp, Vaccinia virus
ggccaaagccagagact

SEQ ID NO: 1670 - DNA, 21 bp, Vaccinia virus
atatttttataaggctttttt

SEQ ID NO: 1671 - DNA, 23 bp, Vaccinia virus
ggtggcggggttttgcagagctc

SEQ ID NO: 1672 - DNA, 20 bp, Vaccinia virus
gattgtacaaatacaaggaa

SEQ ID NO: 1673 - DNA, 20 bp, Vaccinia virus
acaaattgtaaagaatatgt

SEQ ID NO: 1674 - DNA, 19 bp, Vaccinia virus
tgactttccttaatgttta

SEQ ID NO: 1675 - DNA, 18 bp, Vaccinia virus
tatccctgggttacacta

SEQ ID NO: 1676 - DNA, 19 bp, Vaccinia virus
cagctccgacgccctcccg

SEQ ID NO: 1677 - DNA, 19 bp, Vaccinia virus
tagtagtatgtaactatta

SEQ ID NO: 1678 - DNA, 18 bp, Vaccinia virus
gatgacagccccacctcc

SEQ ID NO: 1679 - DNA, 22 bp, Vaccinia virus
ataccagaaacatctacttggg

SEQ ID NO: 1680 - DNA, 16 bp, Vaccinia virus
gaagtcattgtattca

SEQ ID NO: 1681 - DNA, 17 bp, Vaccinia virus
tgtgaggcccaattcca

SEQ ID NO: 1682 - DNA, 17 bp, Vaccinia virus
aggcagaaggatcactt

SEQ ID NO: 1683 - DNA, 18 bp, Vaccinia virus
tgatagtgtctgcacaac

SEQ ID NO: 1684 - DNA, 17 bp, Vaccinia virus
caaatgtaaggccatga

SEQ ID NO: 1685 - DNA, 18 bp, Vaccinia virus
ttggaaattaaaggtgga

SEQ ID NO: 1686 - DNA, 18 bp, Vaccinia virus
gccaacgaggaacacagc

SEQ ID NO: 1687 - DNA, 17 bp, Vaccinia virus
actgaaaatagaattgg

SEQ ID NO: 1688 - DNA, 21 bp, Vaccinia virus
agcatttcataaatgtttagt

SEQ ID NO: 1689 - DNA, 23 bp, Vaccinia virus
ggtggcgggggtggtgctggctc

SEQ ID NO: 1690 - DNA, 18 bp, Vaccinia virus
aagctgtccgttgtattc

SEQ ID NO: 1691 - DNA, 18 bp, Vaccinia virus
gatatgtatgaatgcaaa

SEQ ID NO: 1692 - DNA, 20 bp, Vaccinia virus
gaaaagagttttaaaaaaga

SEQ ID NO: 1693 - DNA, 19 bp, Vaccinia virus
ccgccaattttttacaaat

SEQ ID NO: 1694 - DNA, 18 bp, Vaccinia virus
tgatggaagtggaagatt

SEQ ID NO: 1695 - DNA, 18 bp, Vaccinia virus
ttctggaaaagtcctcaa

SEQ ID NO: 1696 - DNA, 18 bp, Vaccinia virus
ttcatatggacccagaga

SEQ ID NO: 1697 - DNA, 20 bp, Vaccinia virus
tgtaacttcctgtgaattta

SEQ ID NO: 1698 - DNA, 18 bp, Vaccinia virus
tctatctgcacacacaaa

SEQ ID NO: 1699 - DNA, 21 bp, Vaccinia virus
cggtgactatatgagaatgga

SEQ ID NO: 1700 - DNA, 18 bp, Vaccinia virus
ctctggcaaagtcttcaa

SEQ ID NO: 1701 - DNA, 18 bp, Vaccinia virus
gaaacgaaaaagttaagc

SEQ ID NO: 1702 - DNA, 21 bp, Vaccinia virus
agaatgataaattatcaatat

SEQ ID NO: 1703 - DNA, 18 bp, Vaccinia virus
tgactaaggaactgcagc

SEQ ID NO: 1704 - DNA, 20 bp, Vaccinia virus
ggaaactaaactctgtggaa

SEQ ID NO: 1705 - DNA, 20 bp, Vaccinia virus
ttctccaggctcaggtgcca

SEQ ID NO: 1706 - DNA, 26 bp, Vaccinia virus
cctcagaatgatgaaaaatatgaatg

SEQ ID NO: 1707 - DNA, 24 bp, Vaccinia virus
gaaaagaattctgttgaaatcagt

SEQ ID NO: 1708 - DNA, 22 bp, Vaccinia virus
acttccagtttttggattggga

SEQ ID NO: 1709 - DNA, 18 bp, Vaccinia virus
agtcacagacggatttgc

SEQ ID NO: 1710 - DNA, 15 bp, Vaccinia virus
cccctttctactcca

SEQ ID NO: 1711 - DNA, 20 bp, Vaccinia virus
gaaaggtgttcttacatgaa

SEQ ID NO: 1712 - DNA, 20 bp, Vaccinia virus
gaaaggtgttcttacatgaa

SEQ ID NO: 1713 - DNA, 20 bp, Vaccinia virus
gaaaggtgttcttacatgaa

SEQ ID NO: 1714 - DNA, 18 bp, Vaccinia virus
ctcatgggcactcacaga

SEQ ID NO: 1715 - DNA, 24 bp, Vaccinia virus
tgaaaaaggaaacagtgcacacca

SEQ ID NO: 1716 - DNA, 23 bp, Vaccinia virus
ccaagtcacagatagacattcca

SEQ ID NO: 1717 - DNA, 24 bp, Vaccinia virus
tggaaaaattttaatttgtagcca

SEQ ID NO: 1718 - DNA, 22 bp, Vaccinia virus
tggtaatattctatgcaactat

SEQ ID NO: 1719 - DNA, 24 bp, Vaccinia virus
atgtttcatgcatccatacttctg

SEQ ID NO: 1720 - DNA, 22 bp, Vaccinia virus
aaagttcaaaagtagaaatacc

SEQ ID NO: 1721 - DNA, 19 bp, Vaccinia virus
agtgagctgagaccatgcc

SEQ ID NO: 1722 - DNA, 18 bp, Vaccinia virus
ccaaataggcatcatcaa

SEQ ID NO: 1723 - DNA, 24 bp, Vaccinia virus
cagctcccccttcacccctccttg

SEQ ID NO: 1724 - DNA, 21 bp, Vaccinia virus
agactggcttaagccaggagc

SEQ ID NO: 1725 - DNA, 20 bp, Vaccinia virus
ttggaaatatgttcctggaa

SEQ ID NO: 1726 - DNA, 20 bp, Vaccinia virus
taagagaatgttgtgtattt

SEQ ID NO: 1727 - DNA, 22 bp, Vaccinia virus
cagttgagcctcatggctctcc

SEQ ID NO: 1728 - DNA, 16 bp, Vaccinia virus
agccacaggagatgtc

SEQ ID NO: 1729 - DNA, 23 bp, Vaccinia virus
agcattattgaaataaatgttta

SEQ ID NO: 1730 - DNA, 21 bp, Vaccinia virus
ctgaaataatcgaacaggaaa

SEQ ID NO: 1731 - DNA, 15 bp, Vaccinia virus
agaaaaagactttaa

SEQ ID NO: 1732 - DNA, 23 bp, Vaccinia virus
tctgtgataagcagaactagaaa

SEQ ID NO: 1733 - DNA, 19 bp, Vaccinia virus
atgttctgtcatgaatact

SEQ ID NO: 1734 - DNA, 21 bp, Vaccinia virus
tacagtgatagcaactttcca

SEQ ID NO: 1735 - DNA, 21 bp, Vaccinia virus
tgggataactactttaaagaa

SEQ ID NO: 1736 - DNA, 22 bp, Vaccinia virus
caatactctcaattattaacca

SEQ ID NO: 1737 - DNA, 18 bp, Vaccinia virus
accatatcaatccatata

SEQ ID NO: 1738 - DNA, 19 bp, Vaccinia virus
atgttgtaattgtcatatc

SEQ ID NO: 1739 - DNA, 21 bp, Vaccinia virus
atggtgggtgatttcagatat

SEQ ID NO: 1740 - DNA, 22 bp, Vaccinia virus
acatttgttctcttggatctca

SEQ ID NO: 1741 - DNA, 21 bp, Vaccinia virus
cctgccctgcttccccaccca

SEQ ID NO: 1742 - DNA, 20 bp, Vaccinia virus
atgaataacatttcagatac

SEQ ID NO: 1743 - DNA, 19 bp, Vaccinia virus
ttggaaatctgcctgcaga

SEQ ID NO: 1744 - DNA, 17 bp, Vaccinia virus
cacctgctggtaaaaga

SEQ ID NO: 1745 - DNA, 24 bp, Vaccinia virus
tactgccttcataagatcaagtca

SEQ ID NO: 1746 - DNA, 20 bp, Vaccinia virus
aaaggacaactgtagatgaa

SEQ ID NO: 1747 - DNA, 18 bp, Vaccinia virus
tattcctgtctcctcttt

SEQ ID NO: 1748 - DNA, 24 bp, Vaccinia virus
acattaataaatttattgattcca

SEQ ID NO: 1749 - DNA, 19 bp, Vaccinia virus
taaagctggttaaggtggt

SEQ ID NO: 1750 - DNA, 18 bp, Vaccinia virus
gctttgaaaaacttttca

SEQ ID NO: 1751 - DNA, 21 bp, Vaccinia virus
aagtttacatgtactaactta

SEQ ID NO: 1752 - DNA, 20 bp, Vaccinia virus
gcctattcaggatattaact

SEQ ID NO: 1753 - DNA, 17 bp, Vaccinia virus
atagacgaaaatcaact

SEQ ID NO: 1754 - DNA, 20 bp, Vaccinia virus
tagaaataaacaaggcttta

SEQ ID NO: 1755 - DNA, 23 bp, Vaccinia virus
tgacggctttttgacaagactta

SEQ ID NO: 1756 - DNA, 18 bp, Vaccinia virus
ccatctggaggaaataaa

SEQ ID NO: 1757 - DNA, 21 bp, Vaccinia virus
gctgttaccatctcagaggaa

SEQ ID NO: 1758 - DNA, 18 bp, Vaccinia virus
aaaggtatgtgaataaat

SEQ ID NO: 1759 - DNA, 16 bp, Vaccinia virus
aaggaatgctaggcgg

SEQ ID NO: 1760 - DNA, 17 bp, Vaccinia virus
cagtgaggtagcatcta

SEQ ID NO: 1761 - DNA, 17 bp, Vaccinia virus
ccaagcttggtctgtca

SEQ ID NO: 1762 - DNA, 20 bp, Vaccinia virus
aacaggagaatcacttgatg

SEQ ID NO: 1763 - DNA, 20 bp, Vaccinia virus
cagtcacctgatgactctcc

SEQ ID NO: 1764 - DNA, 19 bp, Vaccinia virus
ttaaatggaccatgatact

SEQ ID NO: 1765 - DNA, 21 bp, Vaccinia virus
ctcacagtcctactgaacctc

SEQ ID NO: 1766 - DNA, 18 bp, Vaccinia virus
ggtgcaaggattgagctc

SEQ ID NO: 1767 - DNA, 18 bp, Vaccinia virus
ttctaccaaaactacaaa

SEQ ID NO: 1768 - DNA, 22 bp, Vaccinia virus
cagattgccaccccagcaccta

SEQ ID NO: 1769 - DNA, 20 bp, Vaccinia virus
gctaatggacttgactctca

SEQ ID NO: 1770 - DNA, 18 bp, Vaccinia virus
ctaatggacatcttctca

SEQ ID NO: 1771 - DNA, 23 bp, Vaccinia virus
atatttttgtaaaatgtatttgt

SEQ ID NO: 1772 - DNA, 15 bp, Vaccinia virus
ttctatctagcacaa

SEQ ID NO: 1773 - DNA, 17 bp, Vaccinia virus
ttgtttactgatgagaa

SEQ ID NO: 1774 - DNA, 23 bp, Vaccinia virus
gacgtttaccagtaatatcacca

SEQ ID NO: 1775 - DNA, 18 bp, Vaccinia virus
tctgacagataccacgaa

SEQ ID NO: 1776 - DNA, 19 bp, Vaccinia virus
agctcctgtcaccctgtca

SEQ ID NO: 1777 - DNA, 18 bp, Vaccinia virus
ccccgtgttggtaagaga

SEQ ID NO: 1778 - DNA, 18 bp, Vaccinia virus
atttttattctacctttc

SEQ ID NO: 1779 - DNA, 15 bp, Vaccinia virus
ttttattctcctttc

SEQ ID NO: 1780 - DNA, 20 bp, Vaccinia virus
aagtaataaattccaacaaa

SEQ ID NO: 1781 - DNA, 19 bp, Vaccinia virus
gccaatgaaaatgtgcttc

SEQ ID NO: 1782 - DNA, 16 bp, Vaccinia virus
aaagcatatccgttca

SEQ ID NO: 1783 - DNA, 25 bp, Vaccinia virus
gatggctcttatcatcatctttata

SEQ ID NO: 1784 - DNA, 24 bp, Vaccinia virus
atgcctataataccataatgccag

SEQ ID NO: 1785 - DNA, 21 bp, Vaccinia virus
tgtgactttctggaccttaga

SEQ ID NO: 1786 - DNA, 18 bp, Vaccinia virus
gtacagttttagtataga

SEQ ID NO: 1787 - DNA, 18 bp, Vaccinia virus
taggaatttttattccca

SEQ ID NO: 1788 - DNA, 18 bp, Vaccinia virus
aggattttagtatcctca

SEQ ID NO: 1789 - DNA, 18 bp, Vaccinia virus
tacagtatgacaactatt

SEQ ID NO: 1790 - DNA, 21 bp, Vaccinia virus
agggaattaaagaaagccatg

SEQ ID NO: 1791 - DNA, 22 bp, Vaccinia virus
cagctccagccatccacccctc

SEQ ID NO: 1792 - DNA, 22 bp, Vaccinia virus
atcaacaaacaaatcaaagcca

SEQ ID NO: 1793 - DNA, 19 bp, Vaccinia virus
tttattcatttctctcctc

SEQ ID NO: 1794 - DNA, 17 bp, Vaccinia virus
ccttcatccactccatg

SEQ ID NO: 1795 - DNA, 23 bp, Vaccinia virus
ttggaaattagtgttatctggaa

SEQ ID NO: 1796 - DNA, 19 bp, Vaccinia virus
ttttttaaaatatatttta

SEQ ID NO: 1797 - DNA, 24 bp, Vaccinia virus
agatgtttttattttatattatta

SEQ ID NO: 1798 - DNA, 18 bp, Vaccinia virus
atcccatctgggtcactt

SEQ ID NO: 1799 - DNA, 20 bp, Vaccinia virus
tatttttactctccctcttc

SEQ ID NO: 1800 - DNA, 19 bp, Vaccinia virus
tcctatttccctgccatca

SEQ ID NO: 1801 - DNA, 18 bp, Vaccinia virus
tctcatagtatgcccata

SEQ ID NO: 1802 - DNA, 21 bp, Vaccinia virus
gagtgctccttttgtatttta

SEQ ID NO: 1803 - DNA, 23 bp, Vaccinia virus
gaaaggataacatttctcatgaa

SEQ ID NO: 1804 - DNA, 17 bp, Vaccinia virus
tctgcctacactattta

SEQ ID NO: 1805 - DNA, 18 bp, Vaccinia virus
atgtttggtcctcctctg

SEQ ID NO: 1806 - DNA, 18 bp, Vaccinia virus
tacagccattgcaaaaca

SEQ ID NO: 1807 - DNA, 21 bp, Vaccinia virus
gttctgctatttactctgtgg

SEQ ID NO: 1808 - DNA, 21 bp, Vaccinia virus
agaatcaatactacaactgca

SEQ ID NO: 1809 - DNA, 16 bp, Vaccinia virus
aatggccacctgatga

SEQ ID NO: 1810 - DNA, 18 bp, Vaccinia virus
ctatttactgatcacaaa

SEQ ID NO: 1811 - DNA, 21 bp, Vaccinia virus
gacaaagtctcgctctgtcac

SEQ ID NO: 1812 - DNA, 21 bp, Vaccinia virus
aggacacatggggtacaaaga

SEQ ID NO: 1813 - DNA, 19 bp, Vaccinia virus
ctaaatgtgagatcaagga

SEQ ID NO: 1814 - DNA, 20 bp, Vaccinia virus
tgaagttttgattgtattta

SEQ ID NO: 1815 - DNA, 18 bp, Vaccinia virus
tgacagcgagatgcaagc

SEQ ID NO: 1816 - DNA, 19 bp, Vaccinia virus
agactaacatccattctga

SEQ ID NO: 1817 - DNA, 20 bp, Vaccinia virus
taatgttcggcaaacatgaa

SEQ ID NO: 1818 - DNA, 21 bp, Vaccinia virus
gaagcccgaaacaagacatta

SEQ ID NO: 1819 - DNA, 19 bp, Vaccinia virus
cactacagagcactgtttg

SEQ ID NO: 1820 - DNA, 24 bp, Vaccinia virus
atatctttgtagtagcttttttta

SEQ ID NO: 1821 - DNA, 24 bp, Vaccinia virus
taaaatgggatttataaaaatatt

SEQ ID NO: 1822 - DNA, 18 bp, Vaccinia virus
gcggtatttactacctag

SEQ ID NO: 1823 - DNA, 21 bp, Vaccinia virus
cagacatggccttagtaccta

SEQ ID NO: 1824 - DNA, 18 bp, Vaccinia virus
tgctgaaaaacactcttc

SEQ ID NO: 1825 - DNA, 17 bp, Vaccinia virus
tcatggatcatgtccac

SEQ ID NO: 1826 - DNA, 19 bp, Vaccinia virus
aaagaaataaatccaacaa

SEQ ID NO: 1827 - DNA, 19 bp, Vaccinia virus
aggtggaagttgctagtgc

SEQ ID NO: 1828 - DNA, 17 bp, Vaccinia virus
acagtaacaatttgcca

SEQ ID NO: 1829 - DNA, 20 bp, Vaccinia virus
tatccctgttgcgcacacta

SEQ ID NO: 1830 - DNA, 15 bp, Vaccinia virus
aagcaagacaacaac

SEQ ID NO: 1831 - DNA, 23 bp, Vaccinia virus
tgcaagaaaaaggacttattaaa

SEQ ID NO: 1832 - DNA, 22 bp, Vaccinia virus
acagataataaatatccagtgt

SEQ ID NO: 1833 - DNA, 20 bp, Vaccinia virus
aagggctgcattgtatttta

SEQ ID NO: 1834 - DNA, 19 bp, Vaccinia virus
tatgtaaatcctacttttg

SEQ ID NO: 1835 - DNA, 17 bp, Vaccinia virus
ctatgcaaattaccaca

SEQ ID NO: 1836 - DNA, 20 bp, Vaccinia virus
gatattaacagtcatcctag

SEQ ID NO: 1837 - DNA, 21 bp, Vaccinia virus
ctctaagcaacaaggggagcg

SEQ ID NO: 1838 - DNA, 24 bp, Vaccinia virus
gctgatggtcctgtccaaaggcta

SEQ ID NO: 1839 - DNA, 20 bp, Vaccinia virus
ctgtgggcaataaatgtctg

SEQ ID NO: 1840 - DNA, 17 bp, Vaccinia virus
cggtatgtaaatatgaa

SEQ ID NO: 1841 - DNA, 18 bp, Vaccinia virus
acacctttgctaccagta

SEQ ID NO: 1842 - DNA, 19 bp, Vaccinia virus
caagtattttaaaacactg

SEQ ID NO: 1843 - DNA, 19 bp, Vaccinia virus
gaactaatgttctgtggaa

SEQ ID NO: 1844 - DNA, 18 bp, Vaccinia virus
taatgttctgtggaacat

SEQ ID NO: 1845 - DNA, 21 bp, Vaccinia virus
tactttgagaaacattgacta

SEQ ID NO: 1846 - DNA, 20 bp, Vaccinia virus
agtgttttacacatactgat

SEQ ID NO: 1847 - DNA, 20 bp, Vaccinia virus
cctgcagcagacccgagttg

SEQ ID NO: 1848 - DNA, 22 bp, Vaccinia virus
caatatctcataagactactgc

SEQ ID NO: 1849 - DNA, 20 bp, Vaccinia virus
gacaaaattcatttttttca

SEQ ID NO: 1850 - DNA, 19 bp, Vaccinia virus
aaatcagtgaatggtactg

SEQ ID NO: 1851 - DNA, 23 bp, Vaccinia virus
aatctatggcttgattaaaaata

SEQ ID NO: 1852 - DNA, 20 bp, Vaccinia virus
aaacaaagagacaggaatta

SEQ ID NO: 1853 - DNA, 18 bp, Vaccinia virus
caaatgctgtttatgata

SEQ ID NO: 1854 - DNA, 19 bp, Vaccinia virus
ccattacaaaatgtaatgg

SEQ ID NO: 1855 - DNA, 19 bp, Vaccinia virus
cagttgggccggactctcc

SEQ ID NO: 1856 - DNA, 17 bp, Vaccinia virus
cccctcctcttactccg

SEQ ID NO: 1857 - DNA, 23 bp, Vaccinia virus
tataataaaacatgattgcttaa

SEQ ID NO: 1858 - DNA, 19 bp, Vaccinia virus
gtggggcagacaaaggcag

SEQ ID NO: 1859 - DNA, 19 bp, Vaccinia virus
tgaagtattcaggttctca

SEQ ID NO: 1860 - DNA, 17 bp, Vaccinia virus
atatgacttcttcacat

SEQ ID NO: 1861 - DNA, 19 bp, Vaccinia virus
ctgtggacacacaaggtga

SEQ ID NO: 1862 - DNA, 20 bp, Vaccinia virus
gaagaacagttgaaacatgc

SEQ ID NO: 1863 - DNA, 18 bp, Vaccinia virus
ttttggctactgatgtta

SEQ ID NO: 1864 - DNA, 23 bp, Vaccinia virus
atccactaaactggtcttcttca

SEQ ID NO: 1865 - DNA, 22 bp, Vaccinia virus
gaaaagagtaacagaaagatag

SEQ ID NO: 1866 - DNA, 22 bp, Vaccinia virus
gagaaagagaaggtctatgtca

SEQ ID NO: 1867 - DNA, 17 bp, Vaccinia virus
ttggaaatagctttgtg

SEQ ID NO: 1868 - DNA, 20 bp, Vaccinia virus
tagaagtttgaagactttaa

SEQ ID NO: 1869 - DNA, 19 bp, Vaccinia virus
acattaagtcctacctctg

SEQ ID NO: 1870 - DNA, 22 bp, Vaccinia virus
gacaggaagaaaaatacagtta

SEQ ID NO: 1871 - DNA, 21 bp, Vaccinia virus
aagtggcaactgtcaaagatg

SEQ ID NO: 1872 - DNA, 22 bp, Vaccinia virus
tgaagtaattgtgctgtattta

SEQ ID NO: 1873 - DNA, 20 bp, Vaccinia virus
gaatattttcagatactata

SEQ ID NO: 1874 - DNA, 23 bp, Vaccinia virus
aatatttttaaaatctcctttct

SEQ ID NO: 1875 - DNA, 15 bp, Vaccinia virus
tgtgatggagtatac

SEQ ID NO: 1876 - DNA, 18 bp, Vaccinia virus
aaaatgtttcctctttct

SEQ ID NO: 1877 - DNA, 17 bp, Vaccinia virus
cctgctcaacttctcca

SEQ ID NO: 1878 - DNA, 22 bp, Vaccinia virus
tctccacgtccaggtgtacaca

SEQ ID NO: 1879 - DNA, 18 bp, Vaccinia virus
aggatttacatagacaat

SEQ ID NO: 1880 - DNA, 21 bp, Vaccinia virus
aggatatgtgtgctatataaa

SEQ ID NO: 1881 - DNA, 20 bp, Vaccinia virus
tttgccaaaaaagtccccta

SEQ ID NO: 1882 - DNA, 22 bp, Vaccinia virus
ctgtaggacagtttatcagtca

SEQ ID NO: 1883 - DNA, 22 bp, Vaccinia virus
gccgcagtgtcacctcagtgga

SEQ ID NO: 1884 - DNA, 19 bp, Vaccinia virus
ttatgccatgaacatgcca

SEQ ID NO: 1885 - DNA, 21 bp, Vaccinia virus
atacgcaaacacaccgatgca

SEQ ID NO: 1886 - DNA, 18 bp, Vaccinia virus
gaagaagcaattacttca

SEQ ID NO: 1887 - DNA, 20 bp, Vaccinia virus
atttattcactgatagagaa

SEQ ID NO: 1888 - DNA, 19 bp, Vaccinia virus
gagaatcttggggatgctg

SEQ ID NO: 1889 - DNA, 19 bp, Vaccinia virus
ctgtctccccactcagtgg

SEQ ID NO: 1890 - DNA, 23 bp, Vaccinia virus
gctaatgtctgttagacttttca

SEQ ID NO: 1891 - DNA, 17 bp, Vaccinia virus
ccaccagacactccttc

SEQ ID NO: 1892 - DNA, 24 bp, Vaccinia virus
ccaaaaaaacacaaagtgcttctg

SEQ ID NO: 1893 - DNA, 22 bp, Vaccinia virus
tttgccaagaaaatctgggcct

SEQ ID NO: 1894 - DNA, 19 bp, Vaccinia virus
gcggggaaatgttgagctc

SEQ ID NO: 1895 - DNA, 20 bp, Vaccinia virus
ataaaattgggttcataaag

SEQ ID NO: 1896 - DNA, 18 bp, Vaccinia virus
aaaaaagcatggaaaatg

SEQ ID NO: 1897 - DNA, 23 bp, Vaccinia virus
aatatttttagattcttctgctc

SEQ ID NO: 1898 - DNA, 17 bp, Vaccinia virus
tatgttgaatcaaagtg

SEQ ID NO: 1899 - DNA, 23 bp, Vaccinia virus
gggtcattatcacttaaataata

SEQ ID NO: 1900 - DNA, 22 bp, Vaccinia virus
agaactctgtatccatcagaga

SEQ ID NO: 1901 - DNA, 21 bp, Vaccinia virus
cagctaacaatgtactacaga

SEQ ID NO: 1902 - DNA, 20 bp, Vaccinia virus
agccgctgcaaaatcatgcc

SEQ ID NO: 1903 - DNA, 17 bp, Vaccinia virus
gttagcaaggatatcca

SEQ ID NO: 1904 - DNA, 21 bp, Vaccinia virus
aaaaataaaagcctgtagcta

SEQ ID NO: 1905 - DNA, 21 bp, Vaccinia virus
ttctgcatccatatacaccct

SEQ ID NO: 1906 - DNA, 19 bp, Vaccinia virus
aacatttgtttaattttta

SEQ ID NO: 1907 - DNA, 18 bp, Vaccinia virus
agtagaagatgctacaga

SEQ ID NO: 1908 - DNA, 23 bp, Vaccinia virus
ataaaaatgctcatgggaagtga

SEQ ID NO: 1909 - DNA, 18 bp, Vaccinia virus
agccacctggccatgctg

SEQ ID NO: 1910 - DNA, 18 bp, Vaccinia virus
ttattctgacaatgaaga

SEQ ID NO: 1911 - DNA, 18 bp, Vaccinia virus
tgaaacttgtgccacaga

SEQ ID NO: 1912 - DNA, 19 bp, Vaccinia virus
tgtccatacacagaaacat

SEQ ID NO: 1913 - DNA, 22 bp, Vaccinia virus
attattgacttcaccacacccc

SEQ ID NO: 1914 - DNA, 15 bp, Vaccinia virus
ctgttggtgtgctgc

SEQ ID NO: 1915 - DNA, 19 bp, Vaccinia virus
aaatgaatggtctgtggaa

SEQ ID NO: 1916 - DNA, 17 bp, Vaccinia virus
gaaatgaaatttgtagc

SEQ ID NO: 1917 - DNA, 23 bp, Vaccinia virus
ctctgagtaccctggcgggaggc

SEQ ID NO: 1918 - DNA, 21 bp, Vaccinia virus
cagccccagctgctcctcctc

SEQ ID NO: 1919 - DNA, 17 bp, Vaccinia virus
ccattgcagattcgagt

SEQ ID NO: 1920 - DNA, 17 bp, Vaccinia virus
ttgccaaaactccttct

SEQ ID NO: 1921 - DNA, 17 bp, Vaccinia virus
ttcattgtataccacaa

SEQ ID NO: 1922 - DNA, 18 bp, Vaccinia virus
agaaagagaacaatattt

SEQ ID NO: 1923 - DNA, 23 bp, Vaccinia virus
ttgcaaggaaattgtgctttatc

SEQ ID NO: 1924 - DNA, 19 bp, Vaccinia virus
atgttcttttaaattagtg

SEQ ID NO: 1925 - DNA, 21 bp, Vaccinia virus
tatttttgtcttcttcctttc

SEQ ID NO: 1926 - DNA, 17 bp, Vaccinia virus
ggagcctgcttgtggaa

SEQ ID NO: 1927 - DNA, 18 bp, Vaccinia virus
ctacatatgagtataata

SEQ ID NO: 1928 - DNA, 20 bp, Vaccinia virus
tttttattatcctcctctct

SEQ ID NO: 1929 - DNA, 22 bp, Vaccinia virus
tttttattatcctcctctcttc

SEQ ID NO: 1930 - DNA, 19 bp, Vaccinia virus
agatatggcatgtacttta

SEQ ID NO: 1931 - DNA, 18 bp, Vaccinia virus
aaaaggcaaaggtattat

SEQ ID NO: 1932 - DNA, 17 bp, Vaccinia virus
tctcataggagcataga

SEQ ID NO: 1933 - DNA, 23 bp, Vaccinia virus
ttgtacaatattttgtacaaaga

SEQ ID NO: 1934 - DNA, 19 bp, Vaccinia virus
tggtagtgcatgcctctaa

SEQ ID NO: 1935 - DNA, 20 bp, Vaccinia virus
aactaaactgtattgttatt

SEQ ID NO: 1936 - DNA, 20 bp, Vaccinia virus
atagatgagagcgtgcatgc

SEQ ID NO: 1937 - DNA, 22 bp, Vaccinia virus
gacatgcaacagtcttttcact

SEQ ID NO: 1938 - DNA, 19 bp, Vaccinia virus
tatactgtataacatgtta

SEQ ID NO: 1939 - DNA, 18 bp, Vaccinia virus
ctcacagatggataaatg

SEQ ID NO: 1940 - DNA, 20 bp, Vaccinia virus
atattaattagtttatatta

SEQ ID NO: 1941 - DNA, 18 bp, Vaccinia virus
agctttcagaatatgtca

SEQ ID NO: 1942 - DNA, 18 bp, Vaccinia virus
agagtacatgtattatat

SEQ ID NO: 1943 - DNA, 23 bp, Vaccinia virus
atccctgctactgtcccttctca

SEQ ID NO: 1944 - DNA, 22 bp, Vaccinia virus
tgactttcccacagagactgga

SEQ ID NO: 1945 - DNA, 23 bp, Vaccinia virus
tatagttaataataaatgctgta

SEQ ID NO: 1946 - DNA, 19 bp, Vaccinia virus
atctctgtcctcttgatta

SEQ ID NO: 1947 - DNA, 17 bp, Vaccinia virus
ggcgctgtagacacaac

SEQ ID NO: 1948 - DNA, 19 bp, Vaccinia virus
tggatcatctctacttctg

SEQ ID NO: 1949 - DNA, 19 bp, Vaccinia virus
tgtatgaatagtaccaaag

SEQ ID NO: 1950 - DNA, 21 bp, Vaccinia virus
atacatgggacttcacaaaca

SEQ ID NO: 1951 - DNA, 22 bp, Vaccinia virus
ttctcaatcttgaactcataga

SEQ ID NO: 1952 - DNA, 22 bp, Vaccinia virus
taatttatatctgtacatatta

SEQ ID NO: 1953 - DNA, 18 bp, Vaccinia virus
aaagggggtgcagcgcgg

SEQ ID NO: 1954 - DNA, 22 bp, Vaccinia virus
aacatcagggtgcagaattgat

SEQ ID NO: 1955 - DNA, 19 bp, Vaccinia virus
accaaaactgcaatcagga

SEQ ID NO: 1956 - DNA, 25 bp, Vaccinia virus
ctgcatctttacctatatccattta

SEQ ID NO: 1957 - DNA, 22 bp, Vaccinia virus
taaaggtatgtgctatgataaa

SEQ ID NO: 1958 - DNA, 22 bp, Vaccinia virus
taaaggtatgtgctatgataaa

SEQ ID NO: 1959 - DNA, 23 bp, Vaccinia virus
agaattaggcttaaaaaatgcct

SEQ ID NO: 1960 - DNA, 22 bp, Vaccinia virus
tgaagatgctatttctagaatt

SEQ ID NO: 1961 - DNA, 18 bp, Vaccinia virus
aagctgttcgttgtatca

SEQ ID NO: 1962 - DNA, 21 bp, Vaccinia virus
atttctggtgagtcagtccac

SEQ ID NO: 1963 - DNA, 20 bp, Vaccinia virus
ccgtgttggccccagccacg

SEQ ID NO: 1964 - DNA, 19 bp, Vaccinia virus
tgatgctgcagtggaaaac

SEQ ID NO: 1965 - DNA, 19 bp, Vaccinia virus
aactgctaacttctattga

SEQ ID NO: 1966 - DNA, 18 bp, Vaccinia virus
tatgctacccttaataac

SEQ ID NO: 1967 - DNA, 20 bp, Vaccinia virus
tgatgtaggacttggaaaac

SEQ ID NO: 1968 - DNA, 18 bp, Vaccinia virus
ccatatagcaagtttagt

SEQ ID NO: 1969 - DNA, 21 bp, Vaccinia virus
ttggaaattgaagctgtagag

SEQ ID NO: 1970 - DNA, 17 bp, Vaccinia virus
aggacttttatacctgt

SEQ ID NO: 1971 - DNA, 19 bp, Vaccinia virus
tctgcatccatttgaacac

SEQ ID NO: 1972 - DNA, 22 bp, Vaccinia virus
gaaatttcaatgataaaaaagg

SEQ ID NO: 1973 - DNA, 18 bp, Vaccinia virus
gtacagttaacttataga

SEQ ID NO: 1974 - DNA, 21 bp, Vaccinia virus
tgaagtatagggatgtattta

SEQ ID NO: 1975 - DNA, 19 bp, Vaccinia virus
tgagtgtggtacattaact

SEQ ID NO: 1976 - DNA, 22 bp, Vaccinia virus
tggaggtggtagatgccacaga

SEQ ID NO: 1977 - DNA, 21 bp, Vaccinia virus
tgtttgaactggaaacttcaa

SEQ ID NO: 1978 - DNA, 17 bp, Vaccinia virus
tgatcgcccggaagact

SEQ ID NO: 1979 - DNA, 20 bp, Vaccinia virus
accgcaacaacttggtagga

SEQ ID NO: 1980 - DNA, 19 bp, Vaccinia virus
tttttaagaatatattcta

SEQ ID NO: 1981 - DNA, 24 bp, Vaccinia virus
taaaaaaagttttactgccatatt

SEQ ID NO: 1982 - DNA, 23 bp, Vaccinia virus
gaaatagttctgtcaaaaatagt

SEQ ID NO: 1983 - DNA, 23 bp, Vaccinia virus
gtaaataatcagaggggaataaa

SEQ ID NO: 1984 - DNA, 18 bp, Vaccinia virus
ttcattcccaacacctta

SEQ ID NO: 1985 - DNA, 19 bp, Vaccinia virus
ccatttaaatgggaataaa

SEQ ID NO: 1986 - DNA, 18 bp, Vaccinia virus
tgtgtagacaaccaaaga

SEQ ID NO: 1987 - DNA, 18 bp, Vaccinia virus
aaattttgctaccaaaga

SEQ ID NO: 1988 - DNA, 16 bp, Vaccinia virus
catccttaaatgtcta

SEQ ID NO: 1989 - DNA, 24 bp, Vaccinia virus
tgacactggcacaactgcaaacgg

SEQ ID NO: 1990 - DNA, 22 bp, Vaccinia virus
aaaatattttactctgcctgat

SEQ ID NO: 1991 - DNA, 18 bp, Vaccinia virus
tattctacttctctcttc

SEQ ID NO: 1992 - DNA, 20 bp, Vaccinia virus
atgatattctagatactata

SEQ ID NO: 1993 - DNA, 20 bp, Vaccinia virus
aggatatgtccacataagaa

SEQ ID NO: 1994 - DNA, 23 bp, Vaccinia virus
ttggaaatcagaagtctgtgaga

SEQ ID NO: 1995 - DNA, 18 bp, Vaccinia virus
atgaagcctttcagatac

SEQ ID NO: 1996 - DNA, 19 bp, Vaccinia virus
tctatagtgatgaaacatt

SEQ ID NO: 1997 - DNA, 18 bp, Vaccinia virus
gtccctttaaagcattga

SEQ ID NO: 1998 - DNA, 26 bp, Vaccinia virus
tggtacaacccaggggtaaactatta

SEQ ID NO: 1999 - DNA, 20 bp, Vaccinia virus
ttggtggctgccctgtggaa

SEQ ID NO: 2000 - DNA, 18 bp, Vaccinia virus
tgaaaagatttggaagac

SEQ ID NO: 2001 - DNA, 16 bp, Vaccinia virus
gtcatatgtggcagct

SEQ ID NO: 2002 - DNA, 16 bp, Vaccinia virus
tactgcctatcaaacg

SEQ ID NO: 2003 - DNA, 18 bp, Vaccinia virus
gactggagagccagaggc

SEQ ID NO: 2004 - DNA, 23 bp, Vaccinia virus
tgaagtgtagatcattgtattca

SEQ ID NO: 2005 - DNA, 18 bp, Vaccinia virus
ctcacaaagataaacatc

SEQ ID NO: 2006 - DNA, 19 bp, Vaccinia virus
ttggaaattatgcactttg

SEQ ID NO: 2007 - DNA, 27 bp, Vaccinia virus
ccaaaacataaacaataaatattctca

SEQ ID NO: 2008 - DNA, 18 bp, Vaccinia virus
tcgagtccatatgtccac

SEQ ID NO: 2009 - DNA, 17 bp, Vaccinia virus
attgaatactccatccc

SEQ ID NO: 2010 - DNA, 21 bp, Vaccinia virus
accaaggctgccacgctctaa

SEQ ID NO: 2011 - DNA, 18 bp, Vaccinia virus
agccacagaaaccacgtt

SEQ ID NO: 2012 - DNA, 18 bp, Vaccinia virus
agccacagaaaccacgtt

SEQ ID NO: 2013 - DNA, 21 bp, Vaccinia virus
agatatgtaaataagctctca

SEQ ID NO: 2014 - DNA, 16 bp, Vaccinia virus
cctgatgtgtacctta

SEQ ID NO: 2015 - DNA, 21 bp, Vaccinia virus
aatggccggggacttataaat

SEQ ID NO: 2016 - DNA, 22 bp, Vaccinia virus
agggaacaccagttttcacatg

SEQ ID NO: 2017 - DNA, 19 bp, Vaccinia virus
acaagcaaatgtaactcca

SEQ ID NO: 2018 - DNA, 18 bp, Vaccinia virus
aaactagaacaggtatat

SEQ ID NO: 2019 - DNA, 22 bp, Vaccinia virus
aatggtgggtctataaatttgt

SEQ ID NO: 2020 - DNA, 18 bp, Vaccinia virus
acaaatatcataaaagga

SEQ ID NO: 2021 - DNA, 18 bp, Vaccinia virus
gtagcacaatctataatt

SEQ ID NO: 2022 - DNA, 18 bp, Vaccinia virus
aatggcgttttataaatt

SEQ ID NO: 2023 - DNA, 21 bp, Vaccinia virus
accctgtcattacgtcaacgc

SEQ ID NO: 2024 - DNA, 21 bp, Vaccinia virus
accctgtcattacgtcaacgc

SEQ ID NO: 2025 - DNA, 19 bp, Vaccinia virus
aggctttcaaaagccaaag

SEQ ID NO: 2026 - DNA, 21 bp, Vaccinia virus
accctgtcattacgtcaacgc

SEQ ID NO: 2027 - DNA, 21 bp, Vaccinia virus
accctgtcattacgtcaacgc

SEQ ID NO: 2028 - DNA, 21 bp, Vaccinia virus
accctgtcattacgtcaacgc

SEQ ID NO: 2029 - DNA, 21 bp, Vaccinia virus
tgtacagtatgtaaatgctat

SEQ ID NO: 2030 - DNA, 18 bp, Vaccinia virus
atattgcatccctagaga

SEQ ID NO: 2031 - DNA, 18 bp, Vaccinia virus
ccgcagcgcgcggaggaa

SEQ ID NO: 2032 - DNA, 22 bp, Vaccinia virus
ggtgacagagtgagtgagactc

SEQ ID NO: 2033 - DNA, 18 bp, Vaccinia virus
ccgcagcgcgcggaggaa

SEQ ID NO: 2034 - DNA, 22 bp, Vaccinia virus
ggtgacagagtgagtgagactc

SEQ ID NO: 2035 - DNA, 18 bp, Vaccinia virus
ccgcagcgcgcggaggaa

SEQ ID NO: 2036 - DNA, 18 bp, Vaccinia virus
ccgcagcgcgcggaggaa

SEQ ID NO: 2037 - DNA, 22 bp, Vaccinia virus
aatacaggatgaaaaacactga

SEQ ID NO: 2038 - DNA, 20 bp, Vaccinia virus
agcgaattggttacatcgtt

SEQ ID NO: 2039 - DNA, 23 bp, Vaccinia virus
acaaaagggtatttcttttctct

SEQ ID NO: 2040 - DNA, 18 bp, Vaccinia virus
tatttcttttctctcttc

SEQ ID NO: 2041 - DNA, 23 bp, Vaccinia virus
ttgtgtgaaacccctagcataga

SEQ ID NO: 2042 - DNA, 18 bp, Vaccinia virus
ccttacaatccgagacta

SEQ ID NO: 2043 - DNA, 16 bp, Vaccinia virus
tctgcatccatgccac

SEQ ID NO: 2044 - DNA, 18 bp, Vaccinia virus
gaaaaggaagcatgtagc

SEQ ID NO: 2045 - DNA, 18 bp, Vaccinia virus
tgtagtggaaagaagcat

SEQ ID NO: 2046 - DNA, 16 bp, Vaccinia virus
cccttcttctactcca

SEQ ID NO: 2047 - DNA, 19 bp, Vaccinia virus
ccgcgttttcctgtgctgc

SEQ ID NO: 2048 - DNA, 19 bp, Vaccinia virus
tccttgctctggtaaaaga

SEQ ID NO: 2049 - DNA, 17 bp, Vaccinia virus
tctcagaaagtcttcaa

SEQ ID NO: 2050 - DNA, 19 bp, Vaccinia virus
ccactgattggctggtgta

SEQ ID NO: 2051 - DNA, 21 bp, Vaccinia virus
tctctgccaggaccccataga

SEQ ID NO: 2052 - DNA, 22 bp, Vaccinia virus
tcctattgaaggaaccaccccc

SEQ ID NO: 2053 - DNA, 22 bp, Vaccinia virus
gcccccgggaagagccaaaggc

SEQ ID NO: 2054 - DNA, 25 bp, Vaccinia virus
gacaaaagcaaggccccttttcact

SEQ ID NO: 2055 - DNA, 18 bp, Vaccinia virus
ccctcatgtctggtaaaa

SEQ ID NO: 2056 - DNA, 18 bp, Vaccinia virus
agaaatggatagctttaa

SEQ ID NO: 2057 - DNA, 16 bp, Vaccinia virus
gcttaagccagagcta

SEQ ID NO: 2058 - DNA, 18 bp, Vaccinia virus
gagaattaaaatatttta

SEQ ID NO: 2059 - DNA, 17 bp, Vaccinia virus
acagcattacaaaatcc

SEQ ID NO: 2060 - DNA, 24 bp, Vaccinia virus
taaaatctatgtgttttagactta

SEQ ID NO: 2061 - DNA, 23 bp, Vaccinia virus
tactgcactaccaaattcatttg

SEQ ID NO: 2062 - DNA, 21 bp, Vaccinia virus
aatacaggaaacaagaggtac

SEQ ID NO: 2063 - DNA, 24 bp, Vaccinia virus
aggacttttgtggggccacaagta

SEQ ID NO: 2064 - DNA, 22 bp, Vaccinia virus
cagtcaggccccaggttcttcc

SEQ ID NO: 2065 - DNA, 19 bp, Vaccinia virus
gttgatagccctctagtca

SEQ ID NO: 2066 - DNA, 25 bp, Vaccinia virus
gctctgtattaaaacaaatccacca

SEQ ID NO: 2067 - DNA, 21 bp, Vaccinia virus
ttgagatggaagagtctttaa

SEQ ID NO: 2068 - DNA, 24 bp, Vaccinia virus
agcaaatttggctcgataatatcg

SEQ ID NO: 2069 - DNA, 19 bp, Vaccinia virus
actaaaatactgttattgg

SEQ ID NO: 2070 - DNA, 20 bp, Vaccinia virus
accagaatctccactgtagt

SEQ ID NO: 2071 - DNA, 17 bp, Vaccinia virus
tttatgtaaacatacca

SEQ ID NO: 2072 - DNA, 18 bp, Vaccinia virus
gattcatcattattccta

SEQ ID NO: 2073 - DNA, 20 bp, Vaccinia virus
ggaattgcggaaaacaggac

SEQ ID NO: 2074 - DNA, 21 bp, Vaccinia virus
gaagggggagcaggcacatca

SEQ ID NO: 2075 - DNA, 22 bp, Vaccinia virus
tgtgcaaaattttagtatcaga

SEQ ID NO: 2076 - DNA, 19 bp, Vaccinia virus
aacgatgatgatgaacaca

SEQ ID NO: 2077 - DNA, 18 bp, Vaccinia virus
gccatgaatggtgccctt

SEQ ID NO: 2078 - DNA, 18 bp, Vaccinia virus
atgaataaacatatcttg

SEQ ID NO: 2079 - DNA, 18 bp, Vaccinia virus
tattctttttttcccttc

SEQ ID NO: 2080 - DNA, 17 bp, Vaccinia virus
tactcactgtacttgta

SEQ ID NO: 2081 - DNA, 21 bp, Vaccinia virus
tgcgacccccctgccccgaat

SEQ ID NO: 2082 - DNA, 17 bp, Vaccinia virus
tgcttgacaaattggat

SEQ ID NO: 2083 - DNA, 22 bp, Vaccinia virus
tctggcatgataaaatcatgga

SEQ ID NO: 2084 - DNA, 24 bp, Vaccinia virus
tgataccactaagaagaagattta

SEQ ID NO: 2085 - DNA, 21 bp, Vaccinia virus
gatgatgtcattacttctata

SEQ ID NO: 2086 - DNA, 26 bp, Vaccinia virus
tttacaggtaccatgcagagaacaaa

SEQ ID NO: 2087 - DNA, 22 bp, Vaccinia virus
cagacgtggtgtggtgcacacc

SEQ ID NO: 2088 - DNA, 22 bp, Vaccinia virus
ggcaacaggagaatgtcaagcc

SEQ ID NO: 2089 - DNA, 21 bp, Vaccinia virus
tgatgtggaaacctacttctg

SEQ ID NO: 2090 - DNA, 22 bp, Vaccinia virus
caaaacctgaaactttaaagga

SEQ ID NO: 2091 - DNA, 20 bp, Vaccinia virus
ctggtgctactggtctttct

SEQ ID NO: 2092 - DNA, 19 bp, Vaccinia virus
gtcattgcatggtgaaagc

SEQ ID NO: 2093 - DNA, 19 bp, Vaccinia virus
tctcagggtgggacccata

SEQ ID NO: 2094 - DNA, 20 bp, Vaccinia virus
caggtgaggaccattttcac

SEQ ID NO: 2095 - DNA, 19 bp, Vaccinia virus
gaaagctcacttccatgaa

SEQ ID NO: 2096 - DNA, 19 bp, Vaccinia virus
gcttctgtcatctccagag

SEQ ID NO: 2097 - DNA, 21 bp, Vaccinia virus
tggaaaggggaatctatgcca

SEQ ID NO: 2098 - DNA, 19 bp, Vaccinia virus
tagtcacaaagataatacc

SEQ ID NO: 2099 - DNA, 19 bp, Vaccinia virus
caaaacgagtaaagagcag

SEQ ID NO: 2100 - DNA, 23 bp, Vaccinia virus
tgatgttacttgccacctacttc

SEQ ID NO: 2101 - DNA, 17 bp, Vaccinia virus
aggcagaaggatcactt

SEQ ID NO: 2102 - DNA, 21 bp, Vaccinia virus
tccaggagatggaccaacaga

SEQ ID NO: 2103 - DNA, 19 bp, Vaccinia virus
tgtatcattttgtaccaaa

SEQ ID NO: 2104 - DNA, 19 bp, Vaccinia virus
tcccctctaccaatccctg

SEQ ID NO: 2105 - DNA, 18 bp, Vaccinia virus
actgcagtactgtttgta

SEQ ID NO: 2106 - DNA, 22 bp, Vaccinia virus
aacatcttcaacacagaacaca

SEQ ID NO: 2107 - DNA, 18 bp, Vaccinia virus
atagtttaaacatgcaac

SEQ ID NO: 2108 - DNA, 24 bp, Vaccinia virus
gccatagaattctctccagaagag

SEQ ID NO: 2109 - DNA, 18 bp, Vaccinia virus
ttctctccctttctcttc

SEQ ID NO: 2110 - DNA, 19 bp, Vaccinia virus
ctagaacaggatgtcctgc

SEQ ID NO: 2111 - DNA, 20 bp, Vaccinia virus
atctctgtctacaaaactag

SEQ ID NO: 2112 - DNA, 19 bp, Vaccinia virus
ggaataaatttcacatgaa

SEQ ID NO: 2113 - DNA, 22 bp, Vaccinia virus
tgatgccaactcccccgcactt

SEQ ID NO: 2114 - DNA, 19 bp, Vaccinia virus
gaaccatgctgctacccaa

SEQ ID NO: 2115 - DNA, 19 bp, Vaccinia virus
gtcatatttttgaaagtta

SEQ ID NO: 2116 - DNA, 20 bp, Vaccinia virus
gtgtgaaatttactagcaaa

SEQ ID NO: 2117 - DNA, 23 bp, Vaccinia virus
tctccagggccacaactgtcaca

SEQ ID NO: 2118 - DNA, 19 bp, Vaccinia virus
ggccgagggacaaaggcta

SEQ ID NO: 2119 - DNA, 19 bp, Vaccinia virus
agtgagccgagaccatgcc

SEQ ID NO: 2120 - DNA, 20 bp, Vaccinia virus
atagatctaaatacaaagga

SEQ ID NO: 2121 - DNA, 18 bp, Vaccinia virus
tgctagagtaatgctata

SEQ ID NO: 2122 - DNA, 19 bp, Vaccinia virus
gctaatgaaaatgttttct

SEQ ID NO: 2123 - DNA, 23 bp, Vaccinia virus
acttgagcaaataattgggatga

SEQ ID NO: 2124 - DNA, 20 bp, Vaccinia virus
tagtcacttgccaccatgcc

SEQ ID NO: 2125 - DNA, 19 bp, Vaccinia virus
agaacgctggactttaatg

SEQ ID NO: 2126 - DNA, 19 bp, Vaccinia virus
gaatattctacctaaatat

SEQ ID NO: 2127 - DNA, 22 bp, Vaccinia virus
gaaaaacggaggattaaaacca

SEQ ID NO: 2128 - DNA, 21 bp, Vaccinia virus
tggtacagcacacatgtgagc

SEQ ID NO: 2129 - DNA, 17 bp, Vaccinia virus
tcatacacacagataaa

SEQ ID NO: 2130 - DNA, 19 bp, Vaccinia virus
gaggcagaaaattccactt

SEQ ID NO: 2131 - DNA, 21 bp, Vaccinia virus
atatagtgagaccctatttct

SEQ ID NO: 2132 - DNA, 18 bp, Vaccinia virus
ttttgtaaatgatgagaa

SEQ ID NO: 2133 - DNA, 18 bp, Vaccinia virus
agagaaagacaagggttt

SEQ ID NO: 2134 - DNA, 18 bp, Vaccinia virus
agaatatagtttatctta

SEQ ID NO: 2135 - DNA, 19 bp, Vaccinia virus
aagtaaagatttatctgat

SEQ ID NO: 2136 - DNA, 19 bp, Vaccinia virus
tagtgtttagaatatctaa

SEQ ID NO: 2137 - DNA, 24 bp, Vaccinia virus
gacaaagtgatgttttcttcccat

SEQ ID NO: 2138 - DNA, 19 bp, Vaccinia virus
gaggcttattaaaaatagt

SEQ ID NO: 2139 - DNA, 20 bp, Vaccinia virus
agagaaagattttagctttt

SEQ ID NO: 2140 - DNA, 20 bp, Vaccinia virus
atgtttatgcacactttata

SEQ ID NO: 2141 - DNA, 22 bp, Vaccinia virus
tagaaatgttctcagactttaa

SEQ ID NO: 2142 - DNA, 18 bp, Vaccinia virus
tggcgtgagatgttatct

SEQ ID NO: 2143 - DNA, 21 bp, Vaccinia virus
ccatctaatgttttaaaaggc

SEQ ID NO: 2144 - DNA, 18 bp, Vaccinia virus
ggtaatttatagaacaaa

SEQ ID NO: 2145 - DNA, 22 bp, Vaccinia virus
atctctgttccccatccccagt

SEQ ID NO: 2146 - DNA, 18 bp, Vaccinia virus
ctcttaaatactgtacta

SEQ ID NO: 2147 - DNA, 18 bp, Vaccinia virus
aagtagaaaggtatatca

SEQ ID NO: 2148 - DNA, 19 bp, Vaccinia virus
ttctgcccaccactcacgg

SEQ ID NO: 2149 - DNA, 19 bp, Vaccinia virus
gtgacttcccagcactaga

SEQ ID NO: 2150 - DNA, 19 bp, Vaccinia virus
tctgttttttctaccctag

SEQ ID NO: 2151 - DNA, 19 bp, Vaccinia virus
aaaaaaaattaaggggaaa

SEQ ID NO: 2152 - DNA, 18 bp, Vaccinia virus
gatgccacatagtcttgc

SEQ ID NO: 2153 - DNA, 21 bp, Vaccinia virus
cagccccgactgctcctcctc

SEQ ID NO: 2154 - DNA, 18 bp, Vaccinia virus
agtcaaaatatattacat

SEQ ID NO: 2155 - DNA, 19 bp, Vaccinia virus
gaagcaccgggaagactta

SEQ ID NO: 2156 - DNA, 19 bp, Vaccinia virus
gaagcaccgggaagactta

SEQ ID NO: 2157 - DNA, 19 bp, Vaccinia virus
gaagcaccgggaagactta

SEQ ID NO: 2158 - DNA, 19 bp, Vaccinia virus
gaagcaccgggaagactta

SEQ ID NO: 2159 - DNA, 20 bp, Vaccinia virus
gtcagacagcaaggaactgt

SEQ ID NO: 2160 - DNA, 22 bp, Vaccinia virus
aagtccaaactgatatatccta

SEQ ID NO: 2161 - DNA, 18 bp, Vaccinia virus
gataccagataatcacaa

SEQ ID NO: 2162 - DNA, 22 bp, Vaccinia virus
tatgtaaggggtgagacacaac

SEQ ID NO: 2163 - DNA, 19 bp, Vaccinia virus
tcaagtgcatctattccca

SEQ ID NO: 2164 - DNA, 18 bp, Vaccinia virus
atttatcgtaaacatcca

SEQ ID NO: 2165 - DNA, 23 bp, Vaccinia virus
atggactgaatcacatagattct

SEQ ID NO: 2166 - DNA, 22 bp, Vaccinia virus
atccaatactaaatacccctta

SEQ ID NO: 2167 - DNA, 19 bp, Vaccinia virus
atgaagaatctcaggctgc

SEQ ID NO: 2168 - DNA, 17 bp, Vaccinia virus
tctactaaaactacaaa

SEQ ID NO: 2169 - DNA, 18 bp, Vaccinia virus
aaacaaaactgtagaagc

SEQ ID NO: 2170 - DNA, 24 bp, Vaccinia virus
ttctaaggggaagggacccataga

SEQ ID NO: 2171 - DNA, 17 bp, Vaccinia virus
atgaatgcaaacacatg

SEQ ID NO: 2172 - DNA, 23 bp, Vaccinia virus
aaaaagtttaccatcattttgga

SEQ ID NO: 2173 - DNA, 26 bp, Vaccinia virus
aaagaaaggcaccatcagacaaaaga

SEQ ID NO: 2174 - DNA, 18 bp, Vaccinia virus
tctcacaaatataaaacc

SEQ ID NO: 2175 - DNA, 19 bp, Vaccinia virus
acagacaatgcaggggcag

SEQ ID NO: 2176 - DNA, 17 bp, Vaccinia virus
aggcagaagaatcactt

SEQ ID NO: 2177 - DNA, 16 bp, Vaccinia virus
tctactaaactacaaa

SEQ ID NO: 2178 - DNA, 18 bp, Vaccinia virus
tagaacatttaccgatgc

SEQ ID NO: 2179 - DNA, 20 bp, Vaccinia virus
atgcatatacatacatgata

SEQ ID NO: 2180 - DNA, 22 bp, Vaccinia virus
ttatagacactagtaggacaaa

SEQ ID NO: 2181 - DNA, 21 bp, Vaccinia virus
gaatccccaacacccaataaa

SEQ ID NO: 2182 - DNA, 18 bp, Vaccinia virus
acactctgagaaagagca

SEQ ID NO: 2183 - DNA, 19 bp, Vaccinia virus
ttttggtggctcgatgtta

SEQ ID NO: 2184 - DNA, 18 bp, Vaccinia virus
gcagtgagtgctgagctc

SEQ ID NO: 2185 - DNA, 23 bp, Vaccinia virus
aaaaagcagaggccaagagtttg

SEQ ID NO: 2186 - DNA, 19 bp, Vaccinia virus
attttgtgaatggattgga

SEQ ID NO: 2187 - DNA, 18 bp, Vaccinia virus
ccacatagcaaggtctga

SEQ ID NO: 2188 - DNA, 23 bp, Vaccinia virus
gaaaaaacaaagttctgcatgag

SEQ ID NO: 2189 - DNA, 21 bp, Vaccinia virus
gcaatttacacacttgtctca

SEQ ID NO: 2190 - DNA, 17 bp, Vaccinia virus
acagctgtagtaactat

SEQ ID NO: 2191 - DNA, 17 bp, Vaccinia virus
tgaagtgttcacattca

SEQ ID NO: 2192 - DNA, 18 bp, Vaccinia virus
agccccgccccctcctcg

SEQ ID NO: 2193 - DNA, 18 bp, Vaccinia virus
aaagagaaaaatatttta

SEQ ID NO: 2194 - DNA, 16 bp, Vaccinia virus
agtctttgtagataaa

SEQ ID NO: 2195 - DNA, 18 bp, Vaccinia virus
agtagaccgaaaccatcc

SEQ ID NO: 2196 - DNA, 21 bp, Vaccinia virus
aaaatattgcattcttctgat

SEQ ID NO: 2197 - DNA, 22 bp, Vaccinia virus
aactaaacattctctgttctga

SEQ ID NO: 2198 - DNA, 17 bp, Vaccinia virus
taatgtttggaatggag

SEQ ID NO: 2199 - DNA, 18 bp, Vaccinia virus
tccagagcattccttcta

SEQ ID NO: 2200 - DNA, 19 bp, Vaccinia virus
agtctaggaaaccatgctg

SEQ ID NO: 2201 - DNA, 20 bp, Vaccinia virus
gcagttgttctttaatctcc

SEQ ID NO: 2202 - DNA, 25 bp, Vaccinia virus
aaaaagttgaacaaagatgaactaa

SEQ ID NO: 2203 - DNA, 23 bp, Vaccinia virus
agatgaactaatgtattacatta

SEQ ID NO: 2204 - DNA, 20 bp, Vaccinia virus
ccactgatttttttttaaat

SEQ ID NO: 2205 - DNA, 21 bp, Vaccinia virus
tctgttgtcagaggctcacgg

SEQ ID NO: 2206 - DNA, 21 bp, Vaccinia virus
cagccccatctcctcctcctc

SEQ ID NO: 2207 - DNA, 18 bp, Vaccinia virus
cagaaatatcatcttgga

SEQ ID NO: 2208 - DNA, 18 bp, Vaccinia virus
ctagacaaagctacccag

SEQ ID NO: 2209 - DNA, 17 bp, Vaccinia virus
tgccaggctttgccaaa

SEQ ID NO: 2210 - DNA, 23 bp, Vaccinia virus
aagctgctgacgcaaacaacaac

SEQ ID NO: 2211 - DNA, 25 bp, Vaccinia virus
ccacccctttaaggagttggtaaaa

SEQ ID NO: 2212 - DNA, 18 bp, Vaccinia virus
tcaacaaatgtgagtcat

SEQ ID NO: 2213 - DNA, 23 bp, Vaccinia virus
gatacctacaactcctaggaaga

SEQ ID NO: 2214 - DNA, 17 bp, Vaccinia virus
agccacagaaggcgccg

SEQ ID NO: 2215 - DNA, 24 bp, Vaccinia virus
caaaggcaagctaacaaagttcaa

SEQ ID NO: 2216 - DNA, 18 bp, Vaccinia virus
tatagaccattaagaata

SEQ ID NO: 2217 - DNA, 19 bp, Vaccinia virus
tttgtttttagttatctta

SEQ ID NO: 2218 - DNA, 18 bp, Vaccinia virus
ttaccctctcctctcttc

SEQ ID NO: 2219 - DNA, 28 bp, Vaccinia virus
gcaggaacacaattaggatattttcata

SEQ ID NO: 2220 - DNA, 16 bp, Vaccinia virus
gaaaaagactttgata

SEQ ID NO: 2221 - DNA, 23 bp, Vaccinia virus
caggaatagtcagcatttcacat

SEQ ID NO: 2222 - DNA, 20 bp, Vaccinia virus
ttaccttgcagacggaatga

SEQ ID NO: 2223 - DNA, 21 bp, Vaccinia virus
tgtctttatttttaccaaaga

SEQ ID NO: 2224 - DNA, 19 bp, Vaccinia virus
ggcagtaagtgtccagctc

SEQ ID NO: 2225 - DNA, 23 bp, Vaccinia virus
atattgcaaaaaactacagctaa

SEQ ID NO: 2226 - DNA, 24 bp, Vaccinia virus
tattttcatcagcttcttctctct

SEQ ID NO: 2227 - DNA, 22 bp, Vaccinia virus
gatctaatctgatcatttaata

SEQ ID NO: 2228 - DNA, 21 bp, Vaccinia virus
actgaaacccggaacagattc

SEQ ID NO: 2229 - DNA, 20 bp, Vaccinia virus
aggcagggtctaacccttca

SEQ ID NO: 2230 - DNA, 17 bp, Vaccinia virus
tctgctctctacccact

SEQ ID NO: 2231 - DNA, 21 bp, Vaccinia virus
tatcctcttaaccttctcttc

SEQ ID NO: 2232 - DNA, 21 bp, Vaccinia virus
cactacaattatgcttttgta

SEQ ID NO: 2233 - DNA, 25 bp, Vaccinia virus
ttctgcatctacaactcaacattta

SEQ ID NO: 2234 - DNA, 23 bp, Vaccinia virus
gtccagagttaactgccctgctg

SEQ ID NO: 2235 - DNA, 16 bp, Vaccinia virus
caatgagggtgtcatg

SEQ ID NO: 2236 - DNA, 17 bp, Vaccinia virus
ggggccagaatatctca

SEQ ID NO: 2237 - DNA, 18 bp, Vaccinia virus
ggacaaagctcacatgaa

SEQ ID NO: 2238 - DNA, 20 bp, Vaccinia virus
aaaaggcagaaatccattca

SEQ ID NO: 2239 - DNA, 18 bp, Vaccinia virus
atccacaatccaattacc

SEQ ID NO: 2240 - DNA, 22 bp, Vaccinia virus
cagatgcggtggctcacaccta

SEQ ID NO: 2241 - DNA, 17 bp, Vaccinia virus
tggaaatccgtgtgtaa

SEQ ID NO: 2242 - DNA, 18 bp, Vaccinia virus
tttattctctctgtctct

SEQ ID NO: 2243 - DNA, 20 bp, Vaccinia virus
tagtcacagacacaggagcc

SEQ ID NO: 2244 - DNA, 19 bp, Vaccinia virus
ctctgaggcccaggggagc

SEQ ID NO: 2245 - DNA, 20 bp, Vaccinia virus
cagctggaagacattcctcc

SEQ ID NO: 2246 - DNA, 18 bp, Vaccinia virus
caatgagaaaggagagta

SEQ ID NO: 2247 - DNA, 19 bp, Vaccinia virus
atggaaggacttcagatac

SEQ ID NO: 2248 - DNA, 19 bp, Vaccinia virus
ccaaatgtaagtgccatga

SEQ ID NO: 2249 - DNA, 22 bp, Vaccinia virus
attttgaggactttttctctct

SEQ ID NO: 2250 - DNA, 18 bp, Vaccinia virus
gtacagttaacttataga

SEQ ID NO: 2251 - DNA, 20 bp, Vaccinia virus
gaaataattgctctgttgaa

SEQ ID NO: 2252 - DNA, 18 bp, Vaccinia virus
aaaaaagcatggaaaatg

SEQ ID NO: 2253 - DNA, 20 bp, Vaccinia virus
gaaataattgctctgttgaa

SEQ ID NO: 2254 - DNA, 18 bp, Vaccinia virus
atgttgaaagacttagtg

SEQ ID NO: 2255 - DNA, 18 bp, Vaccinia virus
gagaataaaaagatttta

SEQ ID NO: 2256 - DNA, 16 bp, Vaccinia virus
gtcaagtggaaagcta

SEQ ID NO: 2257 - DNA, 20 bp, Vaccinia virus
tttcgttttcctctctcttc

SEQ ID NO: 2258 - DNA, 21 bp, Vaccinia virus
ttctacacactcagccacaaa

SEQ ID NO: 2259 - DNA, 18 bp, Vaccinia virus
tgattaactggccaataa

SEQ ID NO: 2260 - DNA, 19 bp, Vaccinia virus
tatacctctcactcattca

SEQ ID NO: 2261 - DNA, 19 bp, Vaccinia virus
ctgggagcagaactagaaa

SEQ ID NO: 2262 - DNA, 23 bp, Vaccinia virus
gctaagaatgaaaaagacttctc

SEQ ID NO: 2263 - DNA, 19 bp, Vaccinia virus
aaggaacttttgtataata

SEQ ID NO: 2264 - DNA, 24 bp, Vaccinia virus
actcatcagaccatgcactatgga

SEQ ID NO: 2265 - DNA, 18 bp, Vaccinia virus
cttaagtctggtccctca

SEQ ID NO: 2266 - DNA, 20 bp, Vaccinia virus
aggctgggctgagccaaagc

SEQ ID NO: 2267 - DNA, 18 bp, Vaccinia virus
aaaaagctggtggtgaac

SEQ ID NO: 2268 - DNA, 23 bp, Vaccinia virus
aagtaaaaatagtaagagatgtt

SEQ ID NO: 2269 - DNA, 22 bp, Vaccinia virus
ccatgttagtgctacattgtgc

SEQ ID NO: 2270 - DNA, 18 bp, Vaccinia virus
cactacgctgccatttta

SEQ ID NO: 2271 - DNA, 21 bp, Vaccinia virus
aacagcataaacagctggacc

SEQ ID NO: 2272 - DNA, 21 bp, Vaccinia virus
tgtacagtctaaagctacaga

SEQ ID NO: 2273 - DNA, 17 bp, Vaccinia virus
tagatctgtacctagta

SEQ ID NO: 2274 - DNA, 18 bp, Vaccinia virus
atgaagacccagatacta

SEQ ID NO: 2275 - DNA, 18 bp, Vaccinia virus
caaaacatcagataatat

SEQ ID NO: 2276 - DNA, 21 bp, Vaccinia virus
gttgaaggacaccagctgcgg

SEQ ID NO: 2277 - DNA, 22 bp, Vaccinia virus
aaacgatgatgcaggctattca

SEQ ID NO: 2278 - DNA, 20 bp, Vaccinia virus
aaaagattttattaaagata

SEQ ID NO: 2279 - DNA, 17 bp, Vaccinia virus
gccacagaaacataagt

SEQ ID NO: 2280 - DNA, 18 bp, Vaccinia virus
gtacacagatgctacaga

SEQ ID NO: 2281 - DNA, 19 bp, Vaccinia virus
tcttcttcaattcctgcta

SEQ ID NO: 2282 - DNA, 18 bp, Vaccinia virus
tcatctgggagtccccaa

SEQ ID NO: 2283 - DNA, 20 bp, Vaccinia virus
gaacttgaagactgcagagc

SEQ ID NO: 2284 - DNA, 17 bp, Vaccinia virus
tactgcctgtgctgcta

SEQ ID NO: 2285 - DNA, 20 bp, Vaccinia virus
tatctctgccttccaggcat

SEQ ID NO: 2286 - DNA, 24 bp, Vaccinia virus
aaaattagttgttacctcctcaca

SEQ ID NO: 2287 - DNA, 20 bp, Vaccinia virus
atttgtatatctatctacca

SEQ ID NO: 2288 - DNA, 19 bp, Vaccinia virus
agtcggaaaaccatcgccg

SEQ ID NO: 2289 - DNA, 18 bp, Vaccinia virus
gttctgttgtctaaaagc

SEQ ID NO: 2290 - DNA, 24 bp, Vaccinia virus
tgtgactttcctggtgcatccagg

SEQ ID NO: 2291 - DNA, 18 bp, Vaccinia virus
agtcacagctgggcttcc

SEQ ID NO: 2292 - DNA, 18 bp, Vaccinia virus
aaagaaataaatgacaat

SEQ ID NO: 2293 - DNA, 23 bp, Vaccinia virus
cagctgggcctgcagttcctccc

SEQ ID NO: 2294 - DNA, 16 bp, Vaccinia virus
caatgggggagacata

SEQ ID NO: 2295 - DNA, 22 bp, Vaccinia virus
acaaatctccaagaaaacagct

SEQ ID NO: 2296 - DNA, 17 bp, Vaccinia virus
tctactaaaactacaaa

SEQ ID NO: 2297 - DNA, 22 bp, Vaccinia virus
cctgctgaaaaccctccagtca

SEQ ID NO: 2298 - DNA, 21 bp, Vaccinia virus
acagcacacaagtggctattg

SEQ ID NO: 2299 - DNA, 20 bp, Vaccinia virus
tattttcacattttctctct

SEQ ID NO: 2300 - DNA, 21 bp, Vaccinia virus
acagcacacaagtggctattg

SEQ ID NO: 2301 - DNA, 20 bp, Vaccinia virus
tattttcacattttctctct

SEQ ID NO: 2302 - DNA, 21 bp, Vaccinia virus
acagcacacaagtggctattg

SEQ ID NO: 2303 - DNA, 20 bp, Vaccinia virus
tattttcacattttctctct

SEQ ID NO: 2304 - DNA, 18 bp, Vaccinia virus
acagggaacaaagaaaca

SEQ ID NO: 2305 - DNA, 23 bp, Vaccinia virus
gaaacaaaatcctcaggaaatta

SEQ ID NO: 2306 - DNA, 21 bp, Vaccinia virus
ttcccctttccccactccctg

SEQ ID NO: 2307 - DNA, 17 bp, Vaccinia virus
acagcattacaaaatcc

SEQ ID NO: 2308 - DNA, 20 bp, Vaccinia virus
atttattctgaacgggagaa

SEQ ID NO: 2309 - DNA, 18 bp, Vaccinia virus
tttattccatttctctct

SEQ ID NO: 2310 - DNA, 21 bp, Vaccinia virus
gtatgttgaacccaaactgtg

SEQ ID NO: 2311 - DNA, 23 bp, Vaccinia virus
ataaagccaggtacacgaggcag

SEQ ID NO: 2312 - DNA, 23 bp, Vaccinia virus
agcaccaacagcacagttcttca

SEQ ID NO: 2313 - DNA, 21 bp, Vaccinia virus
cattaaaataacctgaaggaa

SEQ ID NO: 2314 - DNA, 18 bp, Vaccinia virus
aagtagaaaggtatatca

SEQ ID NO: 2315 - DNA, 20 bp, Vaccinia virus
tcccctctccacccacccca

SEQ ID NO: 2316 - DNA, 23 bp, Vaccinia virus
ctaatatccagaatctacaaaga

SEQ ID NO: 2317 - DNA, 20 bp, Vaccinia virus
gtgctgaaatccacgccaga

SEQ ID NO: 2318 - DNA, 20 bp, Vaccinia virus
gtgctgaaatccacgccaga

SEQ ID NO: 2319 - DNA, 20 bp, Vaccinia virus
gtgctgaaatccacgccaga

SEQ ID NO: 2320 - DNA, 21 bp, Vaccinia virus
agatcagagactgtaaaaagt

SEQ ID NO: 2321 - DNA, 20 bp, Vaccinia virus
gtgctgaaatccacgccaga

SEQ ID NO: 2322 - DNA, 23 bp, Vaccinia virus
aattgttatctaaagatgattct

SEQ ID NO: 2323 - DNA, 20 bp, Vaccinia virus
aattaagcaactgacattga

SEQ ID NO: 2324 - DNA, 22 bp, Vaccinia virus
atgcttatacaataaatatgaa

SEQ ID NO: 2325 - DNA, 18 bp, Vaccinia virus
ttctatccaatttgtgaa

SEQ ID NO: 2326 - DNA, 18 bp, Vaccinia virus
tctcttatttctcttttc

SEQ ID NO: 2327 - DNA, 24 bp, Vaccinia virus
ttcccatagacacccagcccatag

SEQ ID NO: 2328 - DNA, 22 bp, Vaccinia virus
atatttttgtcttacttttttt

SEQ ID NO: 2329 - DNA, 22 bp, Vaccinia virus
aatgcccagtactgccatttga

SEQ ID NO: 2330 - DNA, 22 bp, Vaccinia virus
tggaggtggtagatgccacaga

SEQ ID NO: 2331 - DNA, 24 bp, Vaccinia virus
aatattatattttttctataaaaa

SEQ ID NO: 2332 - DNA, 22 bp, Vaccinia virus
tatttttattcttgtgaccctc

SEQ ID NO: 2333 - DNA, 19 bp, Vaccinia virus
tggcctggtgcctgtggaa

SEQ ID NO: 2334 - DNA, 18 bp, Vaccinia virus
aatgttacttctaaaatt

SEQ ID NO: 2335 - DNA, 23 bp, Vaccinia virus
aaataaaagcagaatgtatatca

SEQ ID NO: 2336 - DNA, 20 bp, Vaccinia virus
agctgggtaataaatgtcta

SEQ ID NO: 2337 - DNA, 23 bp, Vaccinia virus
atccagtaatccagtctccctca

SEQ ID NO: 2338 - DNA, 23 bp, Vaccinia virus
ttccccagccagatggggtcaca

SEQ ID NO: 2339 - DNA, 20 bp, Vaccinia virus
ccgctgacttgtgaatggga

SEQ ID NO: 2340 - DNA, 20 bp, Vaccinia virus
taattcagtatagaatatgc

SEQ ID NO: 2341 - DNA, 23 bp, Vaccinia virus
tatttctgattctccctctcttc

SEQ ID NO: 2342 - DNA, 22 bp, Vaccinia virus
ggaaacgagtttgtacagaagt

SEQ ID NO: 2343 - DNA, 19 bp, Vaccinia virus
agttgaatgacaaagcagt

SEQ ID NO: 2344 - DNA, 21 bp, Vaccinia virus
agctagaaacagaaaacccat

SEQ ID NO: 2345 - DNA, 21 bp, Vaccinia virus
tcagaagttccaaacagcaac

SEQ ID NO: 2346 - DNA, 19 bp, Vaccinia virus
agtgagccaaaatcatgcc

SEQ ID NO: 2347 - DNA, 19 bp, Vaccinia virus
ttttgttcttgtccctctc

SEQ ID NO: 2348 - DNA, 23 bp, Vaccinia virus
agaacagggatttctatcaatgt

SEQ ID NO: 2349 - DNA, 24 bp, Vaccinia virus
attctctaccactgctctttctca

SEQ ID NO: 2350 - DNA, 22 bp, Vaccinia virus
aggatagtataaataaaaagaa

SEQ ID NO: 2351 - DNA, 16 bp, Vaccinia virus
aagaattttctgtaca

SEQ ID NO: 2352 - DNA, 19 bp, Vaccinia virus
gtgggaaaaaagcagaggc

SEQ ID NO: 2353 - DNA, 19 bp, Vaccinia virus
agtcacagaactgggggtc

SEQ ID NO: 2354 - DNA, 21 bp, Vaccinia virus
cggaagcagccctacaacaac

SEQ ID NO: 2355 - DNA, 20 bp, Vaccinia virus
cctattttatttctccatca

SEQ ID NO: 2356 - DNA, 19 bp, Vaccinia virus
aaaggcttactgataaact

SEQ ID NO: 2357 - DNA, 17 bp, Vaccinia virus
aatggagatcaatttta

SEQ ID NO: 2358 - DNA, 17 bp, Vaccinia virus
tctacctttgccacaag

SEQ ID NO: 2359 - DNA, 18 bp, Vaccinia virus
ggaatttggaaacctcaa

SEQ ID NO: 2360 - DNA, 17 bp, Vaccinia virus
ccgctacaaggacagtg

SEQ ID NO: 2361 - DNA, 22 bp, Vaccinia virus
aaaggacaaataaagcaatgaa

SEQ ID NO: 2362 - DNA, 19 bp, Vaccinia virus
cagttgggccggactctcc

SEQ ID NO: 2363 - DNA, 22 bp, Vaccinia virus
aagtaaagatataattagagat

SEQ ID NO: 2364 - DNA, 18 bp, Vaccinia virus
ttctggaagaatctacaa

SEQ ID NO: 2365 - DNA, 18 bp, Vaccinia virus
agttgagaaactctcctg

SEQ ID NO: 2366 - DNA, 20 bp, Vaccinia virus
atccaatacatatttttctc

SEQ ID NO: 2367 - DNA, 21 bp, Vaccinia virus
aaagatactcacctgtacaaa

SEQ ID NO: 2368 - DNA, 19 bp, Vaccinia virus
tatttttaattctctcttc

SEQ ID NO: 2369 - DNA, 15 bp, Vaccinia virus
gaaaaggaatagtca

SEQ ID NO: 2370 - DNA, 19 bp, Vaccinia virus
gatgtatggaaataaaggc

SEQ ID NO: 2371 - DNA, 20 bp, Vaccinia virus
ttaccttgcagacggaatga

SEQ ID NO: 2372 - DNA, 20 bp, Vaccinia virus
tgccaagaggcacccccttc

SEQ ID NO: 2373 - DNA, 16 bp, Vaccinia virus
ttctgttagttactca

SEQ ID NO: 2374 - DNA, 19 bp, Vaccinia virus
ataattaatagtatgttta

SEQ ID NO: 2375 - DNA, 18 bp, Vaccinia virus
aaaggacaaggacatgag

SEQ ID NO: 2376 - DNA, 18 bp, Vaccinia virus
tgtacagtcagtactata

SEQ ID NO: 2377 - DNA, 21 bp, Vaccinia virus
atttcagggtttccaatcacc

SEQ ID NO: 2378 - DNA, 17 bp, Vaccinia virus
taatgtttgttacagaa

SEQ ID NO: 2379 - DNA, 17 bp, Vaccinia virus
tgatgttagaatcccac

SEQ ID NO: 2380 - DNA, 20 bp, Vaccinia virus
aacctccttgttttagacac

SEQ ID NO: 2381 - DNA, 16 bp, Vaccinia virus
agccacagaagatgtc

SEQ ID NO: 2382 - DNA, 23 bp, Vaccinia virus
aaggatactgtcatttgcatttt

SEQ ID NO: 2383 - DNA, 22 bp, Vaccinia virus
gagtttcttcttcaaggtctca

SEQ ID NO: 2384 - DNA, 18 bp, Vaccinia virus
ctgaaagtagaactgaaa

SEQ ID NO: 2385 - DNA, 19 bp, Vaccinia virus
tccccttcctagctccatg

SEQ ID NO: 2386 - DNA, 21 bp, Vaccinia virus
agctcctaccttgggccctca

SEQ ID NO: 2387 - DNA, 23 bp, Vaccinia virus
gtatattgaaccctaggctagtg

SEQ ID NO: 2388 - DNA, 18 bp, Vaccinia virus
ttggaaatttttctatgg

SEQ ID NO: 2389 - DNA, 19 bp, Vaccinia virus
agataaacacaaaatccat

SEQ ID NO: 2390 - DNA, 19 bp, Vaccinia virus
agataaacacaaaatccat

SEQ ID NO: 2391 - DNA, 23 bp, Vaccinia virus
aaaaaagctgtaatatgttatct

SEQ ID NO: 2392 - DNA, 21 bp, Vaccinia virus
caatttcaaagagaacccaca

SEQ ID NO: 2393 - DNA, 19 bp, Vaccinia virus
ttattctttcttcctcttc

SEQ ID NO: 2394 - DNA, 16 bp, Vaccinia virus
tgtgagctttatcaga

SEQ ID NO: 2395 - DNA, 23 bp, Vaccinia virus
atggactgaatcacatagattct

SEQ ID NO: 2396 - DNA, 20 bp, Vaccinia virus
cagctccgaagaatcccccg

SEQ ID NO: 2397 - DNA, 17 bp, Vaccinia virus
tgacggagtagcgagct

SEQ ID NO: 2398 - DNA, 21 bp, Vaccinia virus
atgactgagaataagatccac

SEQ ID NO: 2399 - DNA, 18 bp, Vaccinia virus
ccatgtaaatccgggtta

SEQ ID NO: 2400 - DNA, 19 bp, Vaccinia virus
attgaaaggagagcaacgg

SEQ ID NO: 2401 - DNA, 19 bp, Vaccinia virus
attgaaaggagagcaacgg

SEQ ID NO: 2402 - DNA, 19 bp, Vaccinia virus
attgaaaggagagcaacgg

SEQ ID NO: 2403 - DNA, 19 bp, Vaccinia virus
attgaaaggagagcaacgg

SEQ ID NO: 2404 - DNA, 19 bp, Vaccinia virus
attgaaaggagagcaacgg

SEQ ID NO: 2405 - DNA, 19 bp, Vaccinia virus
gaaaacttagtctgtggag

SEQ ID NO: 2406 - DNA, 19 bp, Vaccinia virus
attgaaaggagagcaacgg

SEQ ID NO: 2407 - DNA, 19 bp, Vaccinia virus
gaaaacttagtctgtggag

SEQ ID NO: 2408 - DNA, 16 bp, Vaccinia virus
aatggccacctgatga

SEQ ID NO: 2409 - DNA, 17 bp, Vaccinia virus
aaagttgggttgatagg

SEQ ID NO: 2410 - DNA, 18 bp, Vaccinia virus
acctgcaactgtaatttg

SEQ ID NO: 2411 - DNA, 18 bp, Vaccinia virus
acctgcaactgtaatttg

SEQ ID NO: 2412 - DNA, 18 bp, Vaccinia virus
acctgcaactgtaatttg

SEQ ID NO: 2413 - DNA, 18 bp, Vaccinia virus
acctgcaactgtaatttg

SEQ ID NO: 2414 - DNA, 18 bp, Vaccinia virus
acctgcaactgtaatttg

SEQ ID NO: 2415 - DNA, 21 bp, Vaccinia virus
aggcagaaaaacttgaaatac

SEQ ID NO: 2416 - DNA, 17 bp, Vaccinia virus
ggcaaacatttttgtgg

SEQ ID NO: 2417 - DNA, 25 bp, Vaccinia virus
atatttttgtaacaattgctttttt

SEQ ID NO: 2418 - DNA, 24 bp, Vaccinia virus
gaaaaggttaaatcgtagaagcta

SEQ ID NO: 2419 - DNA, 20 bp, Vaccinia virus
tgatgtcaatggagaactta

SEQ ID NO: 2420 - DNA, 17 bp, Vaccinia virus
tgttgataaatccatca

SEQ ID NO: 2421 - DNA, 18 bp, Vaccinia virus
acctaactgcaatgtgga

SEQ ID NO: 2422 - DNA, 18 bp, Vaccinia virus
acctaactgcaatgtgga

SEQ ID NO: 2423 - DNA, 18 bp, Vaccinia virus
acctaactgcaatgtgga

SEQ ID NO: 2424 - DNA, 18 bp, Vaccinia virus
acctaactgcaatgtgga

SEQ ID NO: 2425 - DNA, 18 bp, Vaccinia virus
acctaactgcaatgtgga

SEQ ID NO: 2426 - DNA, 19 bp, Vaccinia virus
actgcacatattgcttttg

SEQ ID NO: 2427 - DNA, 18 bp, Vaccinia virus
ggtcactttcccattaca

SEQ ID NO: 2428 - DNA, 18 bp, Vaccinia virus
tatcagtttcaaataata

SEQ ID NO: 2429 - DNA, 16 bp, Vaccinia virus
tcccccacctactcca

SEQ ID NO: 2430 - DNA, 20 bp, Vaccinia virus
ttttgtaaaacttttttttc

SEQ ID NO: 2431 - DNA, 20 bp, Vaccinia virus
atcacgtcagtaaaatacta

SEQ ID NO: 2432 - DNA, 22 bp, Vaccinia virus
ttgccactcccccactccttct

SEQ ID NO: 2433 - DNA, 18 bp, Vaccinia virus
atgactgagaacattaaa

SEQ ID NO: 2434 - DNA, 21 bp, Vaccinia virus
aggacttttactaccatggta

SEQ ID NO: 2435 - DNA, 18 bp, Vaccinia virus
cgcaggccctttacttca

SEQ ID NO: 2436 - DNA, 18 bp, Vaccinia virus
gttttaatttaaactagt

SEQ ID NO: 2437 - DNA, 19 bp, Vaccinia virus
atgctactctaataaatat

SEQ ID NO: 2438 - DNA, 19 bp, Vaccinia virus
ccactgcatctcagaggaa

SEQ ID NO: 2439 - DNA, 18 bp, Vaccinia virus
tgaggagacgttgagctc

SEQ ID NO: 2440 - DNA, 21 bp, Vaccinia virus
gaaagttggaagtttgtacca

SEQ ID NO: 2441 - DNA, 17 bp, Vaccinia virus
ctctgtggacctacaga

SEQ ID NO: 2442 - DNA, 18 bp, Vaccinia virus
ggtaactgtggctaggga

SEQ ID NO: 2443 - DNA, 19 bp, Vaccinia virus
agaatggagcagtttaata

SEQ ID NO: 2444 - DNA, 20 bp, Vaccinia virus
ccgtgttggccttggctagg

SEQ ID NO: 2445 - DNA, 21 bp, Vaccinia virus
ctcaacagctgcttattcccg

SEQ ID NO: 2446 - DNA, 18 bp, Vaccinia virus
tgatagtgtctgcacaac

SEQ ID NO: 2447 - DNA, 23 bp, Vaccinia virus
tgcctgacaattagctctattca

SEQ ID NO: 2448 - DNA, 21 bp, Vaccinia virus
aggactttcccgtccacacac

SEQ ID NO: 2449 - DNA, 22 bp, Vaccinia virus
tacactatagcactttgactaa

SEQ ID NO: 2450 - DNA, 24 bp, Vaccinia virus
aatgcaagaaggaacacataagta

SEQ ID NO: 2451 - DNA, 21 bp, Vaccinia virus
aaaaagtgtcaaaggaaatga

SEQ ID NO: 2452 - DNA, 18 bp, Vaccinia virus
tattccctttttctcttc

SEQ ID NO: 2453 - DNA, 23 bp, Vaccinia virus
aaaaggcaaaaccttaccttgga

SEQ ID NO: 2454 - DNA, 23 bp, Vaccinia virus
aaaaggcaaaaccttaccttgga

SEQ ID NO: 2455 - DNA, 17 bp, Vaccinia virus
agtcagtatctgtggaa

SEQ ID NO: 2456 - DNA, 20 bp, Vaccinia virus
aaaggacaactgtagatgaa

SEQ ID NO: 2457 - DNA, 20 bp, Vaccinia virus
aaataaaaacaagtatctca

SEQ ID NO: 2458 - DNA, 18 bp, Vaccinia virus
aaatattagaactagaaa

SEQ ID NO: 2459 - DNA, 19 bp, Vaccinia virus
ctgtctccccactcagtgg

SEQ ID NO: 2460 - DNA, 19 bp, Vaccinia virus
ctgtctccccactcagtgg

SEQ ID NO: 2461 - DNA, 24 bp, Vaccinia virus
ctttactgtgggaaaaccatctca

SEQ ID NO: 2462 - DNA, 20 bp, Vaccinia virus
cagctccgaagaatcccccg

SEQ ID NO: 2463 - DNA, 21 bp, Vaccinia virus
ccatcatctcatctctggatg

SEQ ID NO: 2464 - DNA, 17 bp, Vaccinia virus
gcaggtgcttcaggata

SEQ ID NO: 2465 - DNA, 21 bp, Vaccinia virus
gagaaagggcaaattatttta

SEQ ID NO: 2466 - DNA, 21 bp, Vaccinia virus
gagaaagggcaaattatttta

SEQ ID NO: 2467 - DNA, 18 bp, Vaccinia virus
gtggtcaaatatacatca

SEQ ID NO: 2468 - DNA, 18 bp, Vaccinia virus
gtggtcaaatatacatca

SEQ ID NO: 2469 - DNA, 18 bp, Vaccinia virus
gtggtcaaatatacatca

SEQ ID NO: 2470 - DNA, 19 bp, Vaccinia virus
agatgttcagaatatctca

SEQ ID NO: 2471 - DNA, 24 bp, Vaccinia virus
gatggttggcacaccatttctgta

SEQ ID NO: 2472 - DNA, 19 bp, Vaccinia virus
gaatcattgggactaccca

SEQ ID NO: 2473 - DNA, 18 bp, Vaccinia virus
gctaatgatgacatctca

SEQ ID NO: 2474 - DNA, 17 bp, Vaccinia virus
ggatcatttgtattttg

SEQ ID NO: 2475 - DNA, 20 bp, Vaccinia virus
aaaggacaactgtagatgaa

SEQ ID NO: 2476 - DNA, 22 bp, Vaccinia virus
ggaaacaaatgtttctgacatt

SEQ ID NO: 2477 - DNA, 23 bp, Vaccinia virus
aggactacgagaaagacaaagaa

SEQ ID NO: 2478 - DNA, 19 bp, Vaccinia virus
ctaatgaaaataactccca

SEQ ID NO: 2479 - DNA, 23 bp, Vaccinia virus
aaccattagaggtgcaatctaca

SEQ ID NO: 2480 - DNA, 22 bp, Vaccinia virus
taagggaggtctgtgcatttta

SEQ ID NO: 2481 - DNA, 18 bp, Vaccinia virus
tactacatgctttttgta

SEQ ID NO: 2482 - DNA, 25 bp, Vaccinia virus
agagaaagtttgtaaaattccttac

SEQ ID NO: 2483 - DNA, 20 bp, Vaccinia virus
ctccaaaacgctattccttc

SEQ ID NO: 2484 - DNA, 21 bp, Vaccinia virus
aaaaggaaaccaggagtgcca

SEQ ID NO: 2485 - DNA, 20 bp, Vaccinia virus
tattttacctgcctctcttc

SEQ ID NO: 2486 - DNA, 18 bp, Vaccinia virus
tattcctgttttctcttt

SEQ ID NO: 2487 - DNA, 18 bp, Vaccinia virus
aaacaaatgaaatcaaca

SEQ ID NO: 2488 - DNA, 22 bp, Vaccinia virus
tcccattggtcaccttactcca

SEQ ID NO: 2489 - DNA, 22 bp, Vaccinia virus
ttttgatgtgaaagatgttata

SEQ ID NO: 2490 - DNA, 19 bp, Vaccinia virus
ccgctgattcctttcgtaa

SEQ ID NO: 2491 - DNA, 16 bp, Vaccinia virus
ctctggtttcctcctc

SEQ ID NO: 2492 - DNA, 21 bp, Vaccinia virus
acaaagcttgatgttttcact

SEQ ID NO: 2493 - DNA, 20 bp, Vaccinia virus
gctggtatcgaggtgcccca

SEQ ID NO: 2494 - DNA, 20 bp, Vaccinia virus
aagagtcatgctgtgatgaa

SEQ ID NO: 2495 - DNA, 22 bp, Vaccinia virus
aatctataaagaactcaaacaa

SEQ ID NO: 2496 - DNA, 22 bp, Vaccinia virus
aacctccgaaagctcagcacac

SEQ ID NO: 2497 - DNA, 22 bp, Vaccinia virus
aatgcaaatcaaataaatatga

SEQ ID NO: 2498 - DNA, 19 bp, Vaccinia virus
ataatggtaatgcaaatca

SEQ ID NO: 2499 - DNA, 25 bp, Vaccinia virus
aagacttttttgaaaatatgcagaa

SEQ ID NO: 2500 - DNA, 18 bp, Vaccinia virus
agtacatcattcctcctc

SEQ ID NO: 2501 - DNA, 20 bp, Vaccinia virus
ctgacaaattaaggaggtta

SEQ ID NO: 2502 - DNA, 21 bp, Vaccinia virus
acatggggagatcctacctct

SEQ ID NO: 2503 - DNA, 23 bp, Vaccinia virus
aaagaaatgatgagacaaaaaga

SEQ ID NO: 2504 - DNA, 18 bp, Vaccinia virus
tagcactgtagacacaac

SEQ ID NO: 2505 - DNA, 18 bp, Vaccinia virus
ccaaaattgcaattcaga

SEQ ID NO: 2506 - DNA, 22 bp, Vaccinia virus
gccacctgaaacataaaatgga

SEQ ID NO: 2507 - DNA, 17 bp, Vaccinia virus
gatcatggaccacagaa

SEQ ID NO: 2508 - DNA, 22 bp, Vaccinia virus
ccctaggctggttggtaaaaga

SEQ ID NO: 2509 - DNA, 20 bp, Vaccinia virus
tttacatcatgagagatcaa

SEQ ID NO: 2510 - DNA, 15 bp, Vaccinia virus
cctgatttgaattgg

SEQ ID NO: 2511 - DNA, 23 bp, Vaccinia virus
tcccataatttctcccgcaatca

SEQ ID NO: 2512 - DNA, 17 bp, Vaccinia virus
taatgtttggacttgga

SEQ ID NO: 2513 - DNA, 16 bp, Vaccinia virus
aagtgttctgtattca

SEQ ID NO: 2514 - DNA, 21 bp, Vaccinia virus
caaacaaccgactcctttcca

SEQ ID NO: 2515 - DNA, 18 bp, Vaccinia virus
ccattccatggaaataaa

SEQ ID NO: 2516 - DNA, 19 bp, Vaccinia virus
gatgttgcctcctctcctg

SEQ ID NO: 2517 - DNA, 17 bp, Vaccinia virus
aggccaaaaatatctca

SEQ ID NO: 2518 - DNA, 20 bp, Vaccinia virus
aaaagtgccttgcatcattt

SEQ ID NO: 2519 - DNA, 19 bp, Vaccinia virus
aagaatcattaaaggaagc

SEQ ID NO: 2520 - DNA, 17 bp, Vaccinia virus
agtataaaagcttctca

SEQ ID NO: 2521 - DNA, 17 bp, Vaccinia virus
gagggtgtaataaactg

SEQ ID NO: 2522 - DNA, 21 bp, Vaccinia virus
tgtactggattgcaccaagga

SEQ ID NO: 2523 - DNA, 18 bp, Vaccinia virus
atatttactctttctgtc

SEQ ID NO: 2524 - DNA, 22 bp, Vaccinia virus
tttgccaagaaaatctgggcct

SEQ ID NO: 2525 - DNA, 23 bp, Vaccinia virus
aattaatgatgaggttacatgct

SEQ ID NO: 2526 - DNA, 18 bp, Vaccinia virus
agaaactgttaaattgaa

SEQ ID NO: 2527 - DNA, 18 bp, Vaccinia virus
agtcatttctccatcaca

SEQ ID NO: 2528 - DNA, 19 bp, Vaccinia virus
tagtcattcgtggtaacta

SEQ ID NO: 2529 - DNA, 18 bp, Vaccinia virus
tgctttctacattagtta

SEQ ID NO: 2530 - DNA, 19 bp, Vaccinia virus
aggttggaaatgcactgaa

SEQ ID NO: 2531 - DNA, 17 bp, Vaccinia virus
atgctactgaatttgga

SEQ ID NO: 2532 - DNA, 17 bp, Vaccinia virus
aaatatacagaatggaa

SEQ ID NO: 2533 - DNA, 24 bp, Vaccinia virus
ttgacatttgataaataaacatca

SEQ ID NO: 2534 - DNA, 19 bp, Vaccinia virus
ctgttacttgcttcagtgg

SEQ ID NO: 2535 - DNA, 20 bp, Vaccinia virus
aaaaagcagaggcccagtca

SEQ ID NO: 2536 - DNA, 20 bp, Vaccinia virus
tcccctctaccaagggttcc

SEQ ID NO: 2537 - DNA, 18 bp, Vaccinia virus
ctctgttttccccattca

SEQ ID NO: 2538 - DNA, 20 bp, Vaccinia virus
ctagatgtagatgctgccta

SEQ ID NO: 2539 - DNA, 22 bp, Vaccinia virus
ccaaacaggaagtggacattct

SEQ ID NO: 2540 - DNA, 15 bp, Vaccinia virus
ctgataaaaagaggc

SEQ ID NO: 2541 - DNA, 18 bp, Vaccinia virus
atatgctaaacaaaagaa

SEQ ID NO: 2542 - DNA, 21 bp, Vaccinia virus
cattttattttaaaacgttga

SEQ ID NO: 2543 - DNA, 17 bp, Vaccinia virus
acagcataataaaatcc

SEQ ID NO: 2544 - DNA, 21 bp, Vaccinia virus
tccaccctttaaaagcattga

SEQ ID NO: 2545 - DNA, 18 bp, Vaccinia virus
taacttcatgaagactta

SEQ ID NO: 2546 - DNA, 23 bp, Vaccinia virus
acattaataaattctaagtttca

SEQ ID NO: 2547 - DNA, 25 bp, Vaccinia virus
aatattttcactgttccttctttct

SEQ ID NO: 2548 - DNA, 16 bp, Vaccinia virus
atgccaacaaagctta

SEQ ID NO: 2549 - DNA, 17 bp, Vaccinia virus
ctagacaatttcttcta

SEQ ID NO: 2550 - DNA, 17 bp, Vaccinia virus
ctgttgttaccccaagg

SEQ ID NO: 2551 - DNA, 18 bp, Vaccinia virus
ctaatgaaaattattctc

SEQ ID NO: 2552 - DNA, 17 bp, Vaccinia virus
cgtgttggttttgactg

SEQ ID NO: 2553 - DNA, 23 bp, Vaccinia virus
agagtttgaaatcttcacatgaa

SEQ ID NO: 2554 - DNA, 20 bp, Vaccinia virus
aggatattgaacacaaagaa

SEQ ID NO: 2555 - DNA, 19 bp, Vaccinia virus
gtgactttaaggatttaga

SEQ ID NO: 2556 - DNA, 24 bp, Vaccinia virus
agtatgcatacataaaagcaacca

SEQ ID NO: 2557 - DNA, 22 bp, Vaccinia virus
tgtcttttaaagcatttactaa

SEQ ID NO: 2558 - DNA, 18 bp, Vaccinia virus
gtgttatttcataaaatt

SEQ ID NO: 2559 - DNA, 23 bp, Vaccinia virus
atgttctaactcctagactagtg

SEQ ID NO: 2560 - DNA, 16 bp, Vaccinia virus
tagtcacagaaattcc

SEQ ID NO: 2561 - DNA, 19 bp, Vaccinia virus
agtcattattgttgcagga

SEQ ID NO: 2562 - DNA, 16 bp, Vaccinia virus
agtgaaggacctctca

SEQ ID NO: 2563 - DNA, 17 bp, Vaccinia virus
ggataccacagccaatt

SEQ ID NO: 2564 - DNA, 20 bp, Vaccinia virus
acaaagacattcttcccact

SEQ ID NO: 2565 - DNA, 19 bp, Vaccinia virus
cacgaataaacaaacttaa

SEQ ID NO: 2566 - DNA, 24 bp, Vaccinia virus
ttgacatttgataaataaacatca

SEQ ID NO: 2567 - DNA, 19 bp, Vaccinia virus
tggtgagaaatccaacaaa

SEQ ID NO: 2568 - DNA, 18 bp, Vaccinia virus
tcaaagctcccctataca

SEQ ID NO: 2569 - DNA, 20 bp, Vaccinia virus
tattaagtaaaatccccttc

SEQ ID NO: 2570 - DNA, 22 bp, Vaccinia virus
aaggccagggtaaaatgtctca

SEQ ID NO: 2571 - DNA, 21 bp, Vaccinia virus
atttttatgctgttccctctt

SEQ ID NO: 2572 - DNA, 20 bp, Vaccinia virus
tattttcttttcctctcttt

SEQ ID NO: 2573 - DNA, 16 bp, Vaccinia virus
atgttacaactacttt

SEQ ID NO: 2574 - DNA, 18 bp, Vaccinia virus
taatgtttgaaatacgaa

SEQ ID NO: 2575 - DNA, 17 bp, Vaccinia virus
gaaagtaagtttgtagc

SEQ ID NO: 2576 - DNA, 21 bp, Vaccinia virus
aaaggacaaagcctcagggaa

SEQ ID NO: 2577 - DNA, 21 bp, Vaccinia virus
ttctcataaatgaaggtctgt

SEQ ID NO: 2578 - DNA, 21 bp, Vaccinia virus
gggccccaaaagaccagaggc

SEQ ID NO: 2579 - DNA, 21 bp, Vaccinia virus
tactacacacattgctatttg

SEQ ID NO: 2580 - DNA, 21 bp, Vaccinia virus
tcagaacagatggatgtcaca

SEQ ID NO: 2581 - DNA, 18 bp, Vaccinia virus
tgcacataaaaaataccg

SEQ ID NO: 2582 - DNA, 17 bp, Vaccinia virus
agtcacagagatgagcc

SEQ ID NO: 2583 - DNA, 26 bp, Vaccinia virus
atagctcccaaatgatgagtttgtca

SEQ ID NO: 2584 - DNA, 20 bp, Vaccinia virus
tctaatgttatgtccactta

SEQ ID NO: 2585 - DNA, 16 bp, Vaccinia virus
tgaaaatgctagtggg

SEQ ID NO: 2586 - DNA, 17 bp, Vaccinia virus
actcagtgtggaaaaga

SEQ ID NO: 2587 - DNA, 19 bp, Vaccinia virus
tcacaggaccgtcatgctg

SEQ ID NO: 2588 - DNA, 22 bp, Vaccinia virus
atggacaatactattggtcgat

SEQ ID NO: 2589 - DNA, 17 bp, Vaccinia virus
ttctatctaacacataa

SEQ ID NO: 2590 - DNA, 18 bp, Vaccinia virus
ttctgttagaactcaggg

SEQ ID NO: 2591 - DNA, 23 bp, Vaccinia virus
agcattgttaaagtctctcttca

SEQ ID NO: 2592 - DNA, 18 bp, Vaccinia virus
tgcgtgcagattttgtac

SEQ ID NO: 2593 - DNA, 18 bp, Vaccinia virus
agaaagagaaagaaatat

SEQ ID NO: 2594 - DNA, 19 bp, Vaccinia virus
catcaaatcctgcccccgt

SEQ ID NO: 2595 - DNA, 22 bp, Vaccinia virus
ccacccttcatactggccagag

SEQ ID NO: 2596 - DNA, 18 bp, Vaccinia virus
tccagagcatttatctgc

SEQ ID NO: 2597 - DNA, 19 bp, Vaccinia virus
atgttgaattttaaactag

SEQ ID NO: 2598 - DNA, 19 bp, Vaccinia virus
tgtgtaaaactgccaagga

SEQ ID NO: 2599 - DNA, 19 bp, Vaccinia virus
tttgtggcaaaaattttca

SEQ ID NO: 2600 - DNA, 17 bp, Vaccinia virus
attattgacaacaccat

SEQ ID NO: 2601 - DNA, 22 bp, Vaccinia virus
agaatggagcccactaatatta

SEQ ID NO: 2602 - DNA, 22 bp, Vaccinia virus
gaaatcatacctgcagaagcta

SEQ ID NO: 2603 - DNA, 20 bp, Vaccinia virus
tccttgtgttatttctaaaa

SEQ ID NO: 2604 - DNA, 21 bp, Vaccinia virus
caaacaactgaaaaagctgca

SEQ ID NO: 2605 - DNA, 16 bp, Vaccinia virus
atcctgagccatggtg

SEQ ID NO: 2606 - DNA, 19 bp, Vaccinia virus
atttttaggttttctcttc

SEQ ID NO: 2607 - DNA, 21 bp, Vaccinia virus
gactttatgaagatcccacac

SEQ ID NO: 2608 - DNA, 25 bp, Vaccinia virus
ccaaaataataatgaaaataaaggc

SEQ ID NO: 2609 - DNA, 20 bp, Vaccinia virus
ggctccctagcaactcccta

SEQ ID NO: 2610 - DNA, 19 bp, Vaccinia virus
atatgtaaattatgcttta

SEQ ID NO: 2611 - DNA, 16 bp, Vaccinia virus
gacagtggtaagtaaa

SEQ ID NO: 2612 - DNA, 17 bp, Vaccinia virus
tattttttttctctgtc

SEQ ID NO: 2613 - DNA, 16 bp, Vaccinia virus
tgcagcatgctataga

SEQ ID NO: 2614 - DNA, 17 bp, Vaccinia virus
ggatatcacataatgcc

SEQ ID NO: 2615 - DNA, 22 bp, Vaccinia virus
atggaatgatatatccaagttc

SEQ ID NO: 2616 - DNA, 18 bp, Vaccinia virus
ccactgatttttcattgg

SEQ ID NO: 2617 - DNA, 22 bp, Vaccinia virus
aaaggcagaggcatctttcgga

SEQ ID NO: 2618 - DNA, 23 bp, Vaccinia virus
catcaatctggaaagaacttaca

SEQ ID NO: 2619 - DNA, 16 bp, Vaccinia virus
ttggaaatcagtctgt

SEQ ID NO: 2620 - DNA, 21 bp, Vaccinia virus
aatatccagaatctacaaaga

SEQ ID NO: 2621 - DNA, 17 bp, Vaccinia virus
aatcttgctctgttccc

SEQ ID NO: 2622 - DNA, 18 bp, Vaccinia virus
gcggacatcttttaagat

SEQ ID NO: 2623 - DNA, 25 bp, Vaccinia virus
aactaaatatttataactgttctga

SEQ ID NO: 2624 - DNA, 23 bp, Vaccinia virus
tattacagaaaatcccatattca

SEQ ID NO: 2625 - DNA, 23 bp, Vaccinia virus
aatggccggctctgcaaatttat

SEQ ID NO: 2626 - DNA, 17 bp, Vaccinia virus
agccccaggagcataca

SEQ ID NO: 2627 - DNA, 22 bp, Vaccinia virus
tccttgagctttaaagcattga

SEQ ID NO: 2628 - DNA, 24 bp, Vaccinia virus
atcacgggctaataatctttctca

SEQ ID NO: 2629 - DNA, 20 bp, Vaccinia virus
aggatacatactacagagaa

SEQ ID NO: 2630 - DNA, 21 bp, Vaccinia virus
atggaggtggacagagaataa

SEQ ID NO: 2631 - DNA, 21 bp, Vaccinia virus
gtaagatgacagggctgactt

SEQ ID NO: 2632 - DNA, 18 bp, Vaccinia virus
gagattccatactaaaga

SEQ ID NO: 2633 - DNA, 17 bp, Vaccinia virus
ttctatccaacattcaa

SEQ ID NO: 2634 - DNA, 17 bp, Vaccinia virus
tctacccatattacaga

SEQ ID NO: 2635 - DNA, 21 bp, Vaccinia virus
aaaagacaaagttcgaattga

SEQ ID NO: 2636 - DNA, 16 bp, Vaccinia virus
taagggaatgtatgta

SEQ ID NO: 2637 - DNA, 21 bp, Vaccinia virus
cccacccttgctctccaatta

SEQ ID NO: 2638 - DNA, 17 bp, Vaccinia virus
tctactaaaactacaaa

SEQ ID NO: 2639 - DNA, 21 bp, Vaccinia virus
aaagtatttgttacataatca

SEQ ID NO: 2640 - DNA, 19 bp, Vaccinia virus
cttacgtcagtaccacaaa

SEQ ID NO: 2641 - DNA, 20 bp, Vaccinia virus
ctagatgaaaccatatctta

SEQ ID NO: 2642 - DNA, 22 bp, Vaccinia virus
gccaatgaatttctgcttttca

SEQ ID NO: 2643 - DNA, 18 bp, Vaccinia virus
gctgaaactgcaattgga

SEQ ID NO: 2644 - DNA, 18 bp, Vaccinia virus
tcatatagggtgaaaagc

SEQ ID NO: 2645 - DNA, 20 bp, Vaccinia virus
agaatatgctcaatacaaag

SEQ ID NO: 2646 - DNA, 18 bp, Vaccinia virus
aggggagaggcacatttt

SEQ ID NO: 2647 - DNA, 25 bp, Vaccinia virus
atggagaatgggctgaagcgatgct

SEQ ID NO: 2648 - DNA, 22 bp, Vaccinia virus
cctgttccccacctcccggctc

SEQ ID NO: 2649 - DNA, 18 bp, Vaccinia virus
gtgtttaataaatatgaa

SEQ ID NO: 2650 - DNA, 18 bp, Vaccinia virus
tgatgccattgaagactt

SEQ ID NO: 2651 - DNA, 17 bp, Vaccinia virus
aggcaccgcctccatcc

SEQ ID NO: 2652 - DNA, 19 bp, Vaccinia virus
gtctactgggcgaaagcta

SEQ ID NO: 2653 - DNA, 22 bp, Vaccinia virus
tggaaaggcaagtttgtaccca

SEQ ID NO: 2654 - DNA, 18 bp, Vaccinia virus
agggaaaagttataacca

SEQ ID NO: 2655 - DNA, 20 bp, Vaccinia virus
ccaggcaatatctcaggata

SEQ ID NO: 2656 - DNA, 20 bp, Vaccinia virus
ccaccaactatttctggata

SEQ ID NO: 2657 - DNA, 18 bp, Vaccinia virus
gagaataaaactatttta

SEQ ID NO: 2658 - DNA, 23 bp, Vaccinia virus
tgaaaaaggaaagaaagtaacca

SEQ ID NO: 2659 - DNA, 18 bp, Vaccinia virus
caggagatggaccccaga

SEQ ID NO: 2660 - DNA, 20 bp, Vaccinia virus
agaacatgtattcatccaga

SEQ ID NO: 2661 - DNA, 19 bp, Vaccinia virus
gcagaaaaaatacatttca

SEQ ID NO: 2662 - DNA, 20 bp, Vaccinia virus
tccagatgatgctcctgcta

SEQ ID NO: 2663 - DNA, 21 bp, Vaccinia virus
tctgaacacagatatcatcag

SEQ ID NO: 2664 - DNA, 18 bp, Vaccinia virus
ttcatacatatatagata

SEQ ID NO: 2665 - DNA, 19 bp, Vaccinia virus
agaaaaccgtccatttaga

SEQ ID NO: 2666 - DNA, 16 bp, Vaccinia virus
agtcacagcagctgcc

SEQ ID NO: 2667 - DNA, 18 bp, Vaccinia virus
ggaaaaaaatacaaagaa

SEQ ID NO: 2668 - DNA, 17 bp, Vaccinia virus
aaagagagaaacggaca

SEQ ID NO: 2669 - DNA, 20 bp, Vaccinia virus
gtctagagcaccacaccgct

SEQ ID NO: 2670 - DNA, 23 bp, Vaccinia virus
tcctaccagaactcctccgatca

SEQ ID NO: 2671 - DNA, 16 bp, Vaccinia virus
atctctgcttcacagt

SEQ ID NO: 2672 - DNA, 16 bp, Vaccinia virus
ttgccaagaggtctcc

SEQ ID NO: 2673 - DNA, 19 bp, Vaccinia virus
cagtggtccagacttgcca

SEQ ID NO: 2674 - DNA, 23 bp, Vaccinia virus
atgaaggtgtgtcccagatatta

SEQ ID NO: 2675 - DNA, 17 bp, Vaccinia virus
aaaaaaaggggaaatgg

SEQ ID NO: 2676 - DNA, 21 bp, Vaccinia virus
aaaaattgggatatgttatct

SEQ ID NO: 2677 - DNA, 19 bp, Vaccinia virus
agtgagccgagaccatacc

SEQ ID NO: 2678 - DNA, 17 bp, Vaccinia virus
atatgccaaaattgaga

SEQ ID NO: 2679 - DNA, 20 bp, Vaccinia virus
agtatgttatacaaatgcca

SEQ ID NO: 2680 - DNA, 21 bp, Vaccinia virus
tatctctgttttggtaccagt

SEQ ID NO: 2681 - DNA, 18 bp, Vaccinia virus
tagactgtctctgtggaa

SEQ ID NO: 2682 - DNA, 19 bp, Vaccinia virus
tgattgcattggaagatca

SEQ ID NO: 2683 - DNA, 18 bp, Vaccinia virus
ttctacttccaccacaag

SEQ ID NO: 2684 - DNA, 21 bp, Vaccinia virus
ctcagtgaaaacatcaattca

SEQ ID NO: 2685 - DNA, 20 bp, Vaccinia virus
tagagaagggaaagacttta

SEQ ID NO: 2686 - DNA, 18 bp, Vaccinia virus
tgtattttaaaatattga

SEQ ID NO: 2687 - DNA, 20 bp, Vaccinia virus
attaaatccaggaacatata

SEQ ID NO: 2688 - DNA, 18 bp, Vaccinia virus
tgctattaaatagtaaac

SEQ ID NO: 2689 - DNA, 20 bp, Vaccinia virus
gtatgttttacttaaactag

SEQ ID NO: 2690 - DNA, 18 bp, Vaccinia virus
atgggtaccccagagaag

SEQ ID NO: 2691 - DNA, 19 bp, Vaccinia virus
ttctcatgggtaccccaga

SEQ ID NO: 2692 - DNA, 20 bp, Vaccinia virus
aataatattttttttgtttt

SEQ ID NO: 2693 - DNA, 19 bp, Vaccinia virus
tccagagcctctgtcctgc

SEQ ID NO: 2694 - DNA, 18 bp, Vaccinia virus
ttctgttgcccaagctgg

SEQ ID NO: 2695 - DNA, 19 bp, Vaccinia virus
aagcctaaaatatatttta

SEQ ID NO: 2696 - DNA, 19 bp, Vaccinia virus
aggcaggtttgctacacag

SEQ ID NO: 2697 - DNA, 21 bp, Vaccinia virus
agaatggagtgtaccaaatta

SEQ ID NO: 2698 - DNA, 16 bp, Vaccinia virus
ctccttcatctactcc

SEQ ID NO: 2699 - DNA, 19 bp, Vaccinia virus
accatgaactcgtactatg

SEQ ID NO: 2700 - DNA, 22 bp, Vaccinia virus
cctgttccccacctcccggctc

SEQ ID NO: 2701 - DNA, 18 bp, Vaccinia virus
agtcacagaaatcattct

SEQ ID NO: 2702 - DNA, 15 bp, Vaccinia virus
caatgagagattata

SEQ ID NO: 2703 - DNA, 18 bp, Vaccinia virus
aacaaattgtggatcatg

SEQ ID NO: 2704 - DNA, 20 bp, Vaccinia virus
agaatatgtcacataaagaa

SEQ ID NO: 2705 - DNA, 19 bp, Vaccinia virus
aattgttgcctagtcctgc

SEQ ID NO: 2706 - DNA, 21 bp, Vaccinia virus
ataaaattaggtgacaagggt

SEQ ID NO: 2707 - DNA, 22 bp, Vaccinia virus
tatctctaagttatactaatta

SEQ ID NO: 2708 - DNA, 20 bp, Vaccinia virus
attctctgacctttctctct

SEQ ID NO: 2709 - DNA, 19 bp, Vaccinia virus
cctgtttcccaccttctct

SEQ ID NO: 2710 - DNA, 19 bp, Vaccinia virus
atgttgaatgtatctagtg

SEQ ID NO: 2711 - DNA, 18 bp, Vaccinia virus
ttttattttcctgtcttc

SEQ ID NO: 2712 - DNA, 17 bp, Vaccinia virus
cggaacacaccctctca

SEQ ID NO: 2713 - DNA, 20 bp, Vaccinia virus
caggaatgtacactttacat

SEQ ID NO: 2714 - DNA, 19 bp, Vaccinia virus
tgcaaagaaggtttccaga

SEQ ID NO: 2715 - DNA, 19 bp, Vaccinia virus
attgaaagaggtgtgctgg

SEQ ID NO: 2716 - DNA, 18 bp, Vaccinia virus
tgatttttataccaaaga

SEQ ID NO: 2717 - DNA, 22 bp, Vaccinia virus
atttttttttctctctcttttc

SEQ ID NO: 2718 - DNA, 22 bp, Vaccinia virus
ttggaaataaagaagtgctctg

SEQ ID NO: 2719 - DNA, 18 bp, Vaccinia virus
gtcatatgaatgttgagc

SEQ ID NO: 2720 - DNA, 17 bp, Vaccinia virus
tataggttaggaacaaa

SEQ ID NO: 2721 - DNA, 17 bp, Vaccinia virus
tacagctgagcaatgca

SEQ ID NO: 2722 - DNA, 21 bp, Vaccinia virus
taccttgatgcaaatttgcca

SEQ ID NO: 2723 - DNA, 18 bp, Vaccinia virus
tattttttgctttctctc

SEQ ID NO: 2724 - DNA, 20 bp, Vaccinia virus
tggcagcagtgctctgggaa

SEQ ID NO: 2725 - DNA, 18 bp, Vaccinia virus
gaaatcagtgttgtggag

SEQ ID NO: 2726 - DNA, 19 bp, Vaccinia virus
tttgcacatcagcatttta

SEQ ID NO: 2727 - DNA, 18 bp, Vaccinia virus
agacagaaatgttacttc

SEQ ID NO: 2728 - DNA, 17 bp, Vaccinia virus
gtcatgggaggaagcta

SEQ ID NO: 2729 - DNA, 22 bp, Vaccinia virus
cagatgtggccatccctccctg

SEQ ID NO: 2730 - DNA, 18 bp, Vaccinia virus
cccacttccttccagtca

SEQ ID NO: 2731 - DNA, 18 bp, Vaccinia virus
aagataagctattattaa

SEQ ID NO: 2732 - DNA, 21 bp, Vaccinia virus
tgatgcttcattgaagactta

SEQ ID NO: 2733 - DNA, 19 bp, Vaccinia virus
agtgagccgagaccatgcc

SEQ ID NO: 2734 - DNA, 18 bp, Vaccinia virus
ggtcaaaagtttgagcca

SEQ ID NO: 2735 - DNA, 24 bp, Vaccinia virus
cagcttttggtaatattcttcctc

SEQ ID NO: 2736 - DNA, 24 bp, Vaccinia virus
cgacagaataaggtacaaatgtag

SEQ ID NO: 2737 - DNA, 21 bp, Vaccinia virus
atgaagtcttttaacagtctc

SEQ ID NO: 2738 - DNA, 18 bp, Vaccinia virus
tccatgctgtagatacca

SEQ ID NO: 2739 - DNA, 17 bp, Vaccinia virus
ttaggaattaaattctc

SEQ ID NO: 2740 - DNA, 19 bp, Vaccinia virus
aacagcataaaggacccca

SEQ ID NO: 2741 - DNA, 21 bp, Vaccinia virus
cctaccttatttctccagcca

SEQ ID NO: 2742 - DNA, 20 bp, Vaccinia virus
caaaatgtaccttattccca

SEQ ID NO: 2743 - DNA, 22 bp, Vaccinia virus
tatttttattttctccctgctc

SEQ ID NO: 2744 - DNA, 19 bp, Vaccinia virus
ccagacaagtgcccaacga

SEQ ID NO: 2745 - DNA, 17 bp, Vaccinia virus
caacaaaaaggagctat

SEQ ID NO: 2746 - DNA, 19 bp, Vaccinia virus
tagtcacaagatttaccat

SEQ ID NO: 2747 - DNA, 18 bp, Vaccinia virus
aactaaactactaagtta

SEQ ID NO: 2748 - DNA, 17 bp, Vaccinia virus
gatgtcgaagaaactta

SEQ ID NO: 2749 - DNA, 16 bp, Vaccinia virus
tccattttaaaacatt

SEQ ID NO: 2750 - DNA, 24 bp, Vaccinia virus
caaggacaaggagaatgaattcaa

SEQ ID NO: 2751 - DNA, 21 bp, Vaccinia virus
gacaaagttctgtttcttcac

SEQ ID NO: 2752 - DNA, 18 bp, Vaccinia virus
caggacgtcctctacaca

SEQ ID NO: 2753 - DNA, 19 bp, Vaccinia virus
ctctgagaagagtgtcaca

SEQ ID NO: 2754 - DNA, 23 bp, Vaccinia virus
gcgactcggggcactgctcctca

SEQ ID NO: 2755 - DNA, 19 bp, Vaccinia virus
gagtccttcggtggcctca

SEQ ID NO: 2756 - DNA, 15 bp, Vaccinia virus
tgggacagccgactt

SEQ ID NO: 2757 - DNA, 18 bp, Vaccinia virus
aattaaaaatccaacaaa

SEQ ID NO: 2758 - DNA, 19 bp, Vaccinia virus
gcattatttggaagactta

SEQ ID NO: 2759 - DNA, 22 bp, Vaccinia virus
atggatgaagatgatgaccgat

SEQ ID NO: 2760 - DNA, 21 bp, Vaccinia virus
gaaagtattcctatcatgtat

SEQ ID NO: 2761 - DNA, 23 bp, Vaccinia virus
tattaatgtttaaatcccatctc

SEQ ID NO: 2762 - DNA, 17 bp, Vaccinia virus
gaaatatgcaggtatat

SEQ ID NO: 2763 - DNA, 18 bp, Vaccinia virus
tggaaactagaagactta

SEQ ID NO: 2764 - DNA, 16 bp, Vaccinia virus
agtcacaaacaatgtc

SEQ ID NO: 2765 - DNA, 21 bp, Vaccinia virus
aaacaaaacatctcaggacat

SEQ ID NO: 2766 - DNA, 17 bp, Vaccinia virus
attggtaaacaaccaat

SEQ ID NO: 2767 - DNA, 17 bp, Vaccinia virus
cccctcctctctccatg

SEQ ID NO: 2768 - DNA, 19 bp, Vaccinia virus
tttccagaagggtctccaa

SEQ ID NO: 2769 - DNA, 19 bp, Vaccinia virus
ataccagaggtcacttcag

SEQ ID NO: 2770 - DNA, 20 bp, Vaccinia virus
cagctggaagacattcctcc

SEQ ID NO: 2771 - DNA, 18 bp, Vaccinia virus
tgaaaaaaaccagagact

SEQ ID NO: 2772 - DNA, 17 bp, Vaccinia virus
aggcagaaggatcactt

SEQ ID NO: 2773 - DNA, 19 bp, Vaccinia virus
ttttattctctctcccttt

SEQ ID NO: 2774 - DNA, 19 bp, Vaccinia virus
ttttattctctctcccttt

SEQ ID NO: 2775 - DNA, 19 bp, Vaccinia virus
atattacaaatattttgag

SEQ ID NO: 2776 - DNA, 23 bp, Vaccinia virus
ttaatgtattatatacactgata

SEQ ID NO: 2777 - DNA, 20 bp, Vaccinia virus
aagtcaaataaaacaggaca

SEQ ID NO: 2778 - DNA, 18 bp, Vaccinia virus
aatcaatacaatatatgc

SEQ ID NO: 2779 - DNA, 16 bp, Vaccinia virus
gacactctagatgaaa

SEQ ID NO: 2780 - DNA, 22 bp, Vaccinia virus
taacattatgtgattctaaatg

SEQ ID NO: 2781 - DNA, 23 bp, Vaccinia virus
tgtccctgccctagaaacattga

SEQ ID NO: 2782 - DNA, 20 bp, Vaccinia virus
ctagagcacaagtcctgcta

SEQ ID NO: 2783 - DNA, 20 bp, Vaccinia virus
acaaaacaactctgagatga

SEQ ID NO: 2784 - DNA, 19 bp, Vaccinia virus
tatatttttaaaacattga

SEQ ID NO: 2785 - DNA, 23 bp, Vaccinia virus
acgttttacaatcaatttgtaca

SEQ ID NO: 2786 - DNA, 21 bp, Vaccinia virus
tgtctgaaagcaaccctactc

SEQ ID NO: 2787 - DNA, 25 bp, Vaccinia virus
tgtcccacaatgcctaaaacattga

SEQ ID NO: 2788 - DNA, 21 bp, Vaccinia virus
ggtggcggaggcccccagctc

SEQ ID NO: 2789 - DNA, 21 bp, Vaccinia virus
ttggaaaaaccctctgtggag

SEQ ID NO: 2790 - DNA, 20 bp, Vaccinia virus
cagccccggcccattcctcc

SEQ ID NO: 2791 - DNA, 17 bp, Vaccinia virus
aaatgataatgatactg

SEQ ID NO: 2792 - DNA, 18 bp, Vaccinia virus
tgtacagtcagttctata

SEQ ID NO: 2793 - DNA, 18 bp, Vaccinia virus
caaggccatcacaaagca

SEQ ID NO: 2794 - DNA, 17 bp, Vaccinia virus
ttctgccccaccacaaa

SEQ ID NO: 2795 - DNA, 23 bp, Vaccinia virus
aaaagagttgtaaattaaagatg

SEQ ID NO: 2796 - DNA, 20 bp, Vaccinia virus
ttcccctttttcctacccca

SEQ ID NO: 2797 - DNA, 18 bp, Vaccinia virus
tttcaaaaagaggttaca

SEQ ID NO: 2798 - DNA, 18 bp, Vaccinia virus
ctaaacaatttgcattta

SEQ ID NO: 2799 - DNA, 18 bp, Vaccinia virus
gtatgttgaaataaacta

SEQ ID NO: 2800 - DNA, 17 bp, Vaccinia virus
gatttctggaagactta

SEQ ID NO: 2801 - DNA, 28 bp, Vaccinia virus
aaagaaacatcatcttcagataataaga

SEQ ID NO: 2802 - DNA, 18 bp, Vaccinia virus
gctgataaagaagtgcta

SEQ ID NO: 2803 - DNA, 18 bp, Vaccinia virus
cggacatttatttgcatc

SEQ ID NO: 2804 - DNA, 19 bp, Vaccinia virus
gtccaactatttattgcca

SEQ ID NO: 2805 - DNA, 19 bp, Vaccinia virus
ttgaaaagaccacaaccaa

SEQ ID NO: 2806 - DNA, 19 bp, Vaccinia virus
ttacctgggctattgggga

SEQ ID NO: 2807 - DNA, 18 bp, Vaccinia virus
ttttttccctttctctct

SEQ ID NO: 2808 - DNA, 18 bp, Vaccinia virus
ttttttccctttctctct

SEQ ID NO: 2809 - DNA, 18 bp, Vaccinia virus
actaagaaaactatttca

SEQ ID NO: 2810 - DNA, 18 bp, Vaccinia virus
tctggtggagggccatgg

SEQ ID NO: 2811 - DNA, 26 bp, Vaccinia virus
attggaaattgttgctgtgttctgtg

SEQ ID NO: 2812 - DNA, 17 bp, Vaccinia virus
gactttccccattttag

SEQ ID NO: 2813 - DNA, 18 bp, Vaccinia virus
ccagtatttatctctgga

SEQ ID NO: 2814 - DNA, 18 bp, Vaccinia virus
tattttcaccctcttttc

SEQ ID NO: 2815 - DNA, 24 bp, Vaccinia virus
gccacaggttcatatccagaggaa

SEQ ID NO: 2816 - DNA, 16 bp, Vaccinia virus
ggaggcgcctgtggaa

SEQ ID NO: 2817 - DNA, 18 bp, Vaccinia virus
attcctcttcctctcttc

SEQ ID NO: 2818 - DNA, 17 bp, Vaccinia virus
tggtagtgctcctggaa

SEQ ID NO: 2819 - DNA, 21 bp, Vaccinia virus
tgtacaattagtactttatag

SEQ ID NO: 2820 - DNA, 17 bp, Vaccinia virus
aaaatggtacctctttc

SEQ ID NO: 2821 - DNA, 21 bp, Vaccinia virus
tagagtattcagactttgata

SEQ ID NO: 2822 - DNA, 20 bp, Vaccinia virus
aagaaccattaggagtggaa

SEQ ID NO: 2823 - DNA, 23 bp, Vaccinia virus
atgaccctaaagttagtgtggtg

SEQ ID NO: 2824 - DNA, 19 bp, Vaccinia virus
agccatatgtagtcattga

SEQ ID NO: 2825 - DNA, 22 bp, Vaccinia virus
taattccacagtcagaacatgc

SEQ ID NO: 2826 - DNA, 19 bp, Vaccinia virus
aaagtaaatacaatttcaa

SEQ ID NO: 2827 - DNA, 19 bp, Vaccinia virus
ttttggtggctcgatgtta

SEQ ID NO: 2828 - DNA, 22 bp, Vaccinia virus
ggtgacagagtgagtgagactc

SEQ ID NO: 2829 - DNA, 21 bp, Vaccinia virus
atttttataagaaaattttac

SEQ ID NO: 2830 - DNA, 28 bp, Vaccinia virus
ttgtgtgaaagatgtttcataccaagga

SEQ ID NO: 2831 - DNA, 22 bp, Vaccinia virus
agccagacaaaaagaatgattc

SEQ ID NO: 2832 - DNA, 20 bp, Vaccinia virus
aaaaagtacacagaaatatt

SEQ ID NO: 2833 - DNA, 20 bp, Vaccinia virus
aacaaattgcataggagtgt

SEQ ID NO: 2834 - DNA, 24 bp, Vaccinia virus
aaccaccagccgttcctgatctca

SEQ ID NO: 2835 - DNA, 22 bp, Vaccinia virus
atggaatgtggtacaaattgtt

SEQ ID NO: 2836 - DNA, 17 bp, Vaccinia virus
gtctttctacatagtta

SEQ ID NO: 2837 - DNA, 21 bp, Vaccinia virus
cagccaggccctcttctcctg

SEQ ID NO: 2838 - DNA, 15 bp, Vaccinia virus
agcacaaaccatgtc

SEQ ID NO: 2839 - DNA, 16 bp, Vaccinia virus
cctgtttcccacctcc

SEQ ID NO: 2840 - DNA, 21 bp, Vaccinia virus
gtcatttagaagtggaagcta

SEQ ID NO: 2841 - DNA, 23 bp, Vaccinia virus
ttctgttgttcaccattaagggg

SEQ ID NO: 2842 - DNA, 17 bp, Vaccinia virus
ggaacagctctgtggaa

SEQ ID NO: 2843 - DNA, 20 bp, Vaccinia virus
atgaagattgttcagatact

SEQ ID NO: 2844 - DNA, 22 bp, Vaccinia virus
gacaaagtttaacaccttcact

SEQ ID NO: 2845 - DNA, 24 bp, Vaccinia virus
gatagggtttcatttatttctata

SEQ ID NO: 2846 - DNA, 20 bp, Vaccinia virus
tctaagctatgcccatttat

SEQ ID NO: 2847 - DNA, 18 bp, Vaccinia virus
aaaggaaaattctagcca

SEQ ID NO: 2848 - DNA, 22 bp, Vaccinia virus
ttctgttacacatgtctactta

SEQ ID NO: 2849 - DNA, 19 bp, Vaccinia virus
acagggccagcttgccata

SEQ ID NO: 2850 - DNA, 19 bp, Vaccinia virus
gcttcagttataaatagta

SEQ ID NO: 2851 - DNA, 17 bp, Vaccinia virus
agcccctggtcagtctg

SEQ ID NO: 2852 - DNA, 21 bp, Vaccinia virus
aggtgcttatatcccaccaac

SEQ ID NO: 2853 - DNA, 23 bp, Vaccinia virus
atggaaggggaaatatgatagat

SEQ ID NO: 2854 - DNA, 19 bp, Vaccinia virus
aaggatttaaaatatattc

SEQ ID NO: 2855 - DNA, 22 bp, Vaccinia virus
ttccagtgaaacagatgttaca

SEQ ID NO: 2856 - DNA, 22 bp, Vaccinia virus
tattgaaagaagagaggtgggg

SEQ ID NO: 2857 - DNA, 19 bp, Vaccinia virus
ctcaggatggaccctcaga

SEQ ID NO: 2858 - DNA, 18 bp, Vaccinia virus
atggagtctccctctgtc

SEQ ID NO: 2859 - DNA, 21 bp, Vaccinia virus
acaaatgggtattcttttcat

SEQ ID NO: 2860 - DNA, 19 bp, Vaccinia virus
tctctcactacctttctca

SEQ ID NO: 2861 - DNA, 22 bp, Vaccinia virus
aaggaacgcttcccgggacaat

SEQ ID NO: 2862 - DNA, 21 bp, Vaccinia virus
ggaaacaaaacaaaacaaaac

SEQ ID NO: 2863 - DNA, 21 bp, Vaccinia virus
ataaagttacacaaaggtagt

SEQ ID NO: 2864 - DNA, 17 bp, Vaccinia virus
tgacaactggaagactt

SEQ ID NO: 2865 - DNA, 21 bp, Vaccinia virus
aatacaggagatagaaccaga

SEQ ID NO: 2866 - DNA, 18 bp, Vaccinia virus
tttgcttctctttctcct

SEQ ID NO: 2867 - DNA, 24 bp, Vaccinia virus
ggaaacacactcctgcagaagctg

SEQ ID NO: 2868 - DNA, 17 bp, Vaccinia virus
gcagtacagtactatta

SEQ ID NO: 2869 - DNA, 22 bp, Vaccinia virus
accgcaggctatgctctttgta

SEQ ID NO: 2870 - DNA, 16 bp, Vaccinia virus
ttctggccaccacaga

SEQ ID NO: 2871 - DNA, 21 bp, Vaccinia virus
gaaaaggaaaaggaataatca

SEQ ID NO: 2872 - DNA, 19 bp, Vaccinia virus
tagtcaagtcaccatgctg

SEQ ID NO: 2873 - DNA, 22 bp, Vaccinia virus
atttttagcctcttttctcttc

SEQ ID NO: 2874 - DNA, 24 bp, Vaccinia virus
acaaaacaatgctgaagttaatat

SEQ ID NO: 2875 - DNA, 21 bp, Vaccinia virus
gatggaaaactgaaatttgga

SEQ ID NO: 2876 - DNA, 18 bp, Vaccinia virus
tcacagaaagtaaagccg

SEQ ID NO: 2877 - DNA, 18 bp, Vaccinia virus
aggactccctatcccaca

SEQ ID NO: 2878 - DNA, 19 bp, Vaccinia virus
ttttaaaatctattctctc

SEQ ID NO: 2879 - DNA, 19 bp, Vaccinia virus
ggaaacgcgctctgtagaa

SEQ ID NO: 2880 - DNA, 19 bp, Vaccinia virus
cggaagcagtcgctgcaac

SEQ ID NO: 2881 - DNA, 23 bp, Vaccinia virus
gttctgctatttccaatcagtca

SEQ ID NO: 2882 - DNA, 16 bp, Vaccinia virus
gatgccaccagactta

SEQ ID NO: 2883 - DNA, 19 bp, Vaccinia virus
tggcataagctgaatccca

SEQ ID NO: 2884 - DNA, 19 bp, Vaccinia virus
aggcctcaaaacaatgaaa

SEQ ID NO: 2885 - DNA, 20 bp, Vaccinia virus
tatttttatgcctctgtctc

SEQ ID NO: 2886 - DNA, 22 bp, Vaccinia virus
ccaaggtctcacactcctcctg

SEQ ID NO: 2887 - DNA, 20 bp, Vaccinia virus
ttctgttgtgtctcatacag

SEQ ID NO: 2888 - DNA, 22 bp, Vaccinia virus
cttgataatagtcttattccca

SEQ ID NO: 2889 - DNA, 18 bp, Vaccinia virus
actcacataggtgaaaaa

SEQ ID NO: 2890 - DNA, 20 bp, Vaccinia virus
tattctcattacttctcttt

SEQ ID NO: 2891 - DNA, 21 bp, Vaccinia virus
actgcctactgcatcgagtca

SEQ ID NO: 2892 - DNA, 18 bp, Vaccinia virus
gcggcagctactactgcc

SEQ ID NO: 2893 - DNA, 18 bp, Vaccinia virus
gaaataaaagcagcatca

SEQ ID NO: 2894 - DNA, 21 bp, Vaccinia virus
aagtgtttgattcagagatgt

SEQ ID NO: 2895 - DNA, 19 bp, Vaccinia virus
accgacgtcaaaaagtctg

SEQ ID NO: 2896 - DNA, 19 bp, Vaccinia virus
ccatatgaattttggtata

SEQ ID NO: 2897 - DNA, 23 bp, Vaccinia virus
ttctatttaaaaatagccacaaa

SEQ ID NO: 2898 - DNA, 18 bp, Vaccinia virus
acagtaatttttgccatg

SEQ ID NO: 2899 - DNA, 24 bp, Vaccinia virus
ttgacaatggtaataataaaatgg

SEQ ID NO: 2900 - DNA, 21 bp, Vaccinia virus
ctgaggcagaagaatcacttc

SEQ ID NO: 2901 - DNA, 20 bp, Vaccinia virus
gaggcagaagaatcacttca

SEQ ID NO: 2902 - DNA, 20 bp, Vaccinia virus
ccgccctcacccctccaatc

SEQ ID NO: 2903 - DNA, 18 bp, Vaccinia virus
aaatattaacaggtatat

SEQ ID NO: 2904 - DNA, 19 bp, Vaccinia virus
cactgtaatgttacatgca

SEQ ID NO: 2905 - DNA, 22 bp, Vaccinia virus
tgaagtaattgtgctgtattta

SEQ ID NO: 2906 - DNA, 19 bp, Vaccinia virus
aaaaggcagaacagttttg

SEQ ID NO: 2907 - DNA, 17 bp, Vaccinia virus
tctactaaaactacaaa

SEQ ID NO: 2908 - DNA, 24 bp, Vaccinia virus
aatgagtctattaataaatatgaa

SEQ ID NO: 2909 - DNA, 19 bp, Vaccinia virus
caacaaaggattttattcc

SEQ ID NO: 2910 - DNA, 22 bp, Vaccinia virus
gccatgatggaaacagatagtg

SEQ ID NO: 2911 - DNA, 21 bp, Vaccinia virus
aatgttaattatgaaacacct

SEQ ID NO: 2912 - DNA, 17 bp, Vaccinia virus
taatgttgagatacgaa

SEQ ID NO: 2913 - DNA, 24 bp, Vaccinia virus
taaggaaatatttatttgtatttt

SEQ ID NO: 2914 - DNA, 19 bp, Vaccinia virus
aacatcatgattattgatg

SEQ ID NO: 2915 - DNA, 17 bp, Vaccinia virus
ttcatgtaacccataga

SEQ ID NO: 2916 - DNA, 23 bp, Vaccinia virus
gaaataaaaattatttgtataat

SEQ ID NO: 2917 - DNA, 19 bp, Vaccinia virus
gtatgtgctgttaaactag

SEQ ID NO: 2918 - DNA, 21 bp, Vaccinia virus
acttactgaaattcccagtca

SEQ ID NO: 2919 - DNA, 19 bp, Vaccinia virus
acaaaaagactaaacctct

SEQ ID NO: 2920 - DNA, 24 bp, Vaccinia virus
agaaaactaacacccagaaaggag

SEQ ID NO: 2921 - DNA, 24 bp, Vaccinia virus
aatatttttattcttgagttatct

SEQ ID NO: 2922 - DNA, 19 bp, Vaccinia virus
cttcagatcctgtctgtca

SEQ ID NO: 2923 - DNA, 18 bp, Vaccinia virus
agccccggttcctccccg

SEQ ID NO: 2924 - DNA, 16 bp, Vaccinia virus
ggctgaaatggtcaat

SEQ ID NO: 2925 - DNA, 20 bp, Vaccinia virus
gaaacaaatgatgaaaacat

SEQ ID NO: 2926 - DNA, 19 bp, Vaccinia virus
ctcatcctgtacctataga

SEQ ID NO: 2927 - DNA, 16 bp, Vaccinia virus
atacccaggtcaattc

SEQ ID NO: 2928 - DNA, 18 bp, Vaccinia virus
agcagctctggtctgtca

SEQ ID NO: 2929 - DNA, 25 bp, Vaccinia virus
gaatatgtttgtgtatgttcacatg

SEQ ID NO: 2930 - DNA, 23 bp, Vaccinia virus
aggcttcagtaaagcagaggcta

SEQ ID NO: 2931 - DNA, 18 bp, Vaccinia virus
aagtcctaggagcacaca

SEQ ID NO: 2932 - DNA, 20 bp, Vaccinia virus
aaatggttaagggtatatca

SEQ ID NO: 2933 - DNA, 21 bp, Vaccinia virus
actagaatctctagaatttga

SEQ ID NO: 2934 - DNA, 23 bp, Vaccinia virus
tggaaaggagaaacttgcagtca

SEQ ID NO: 2935 - DNA, 19 bp, Vaccinia virus
caagtgatgaatatgctca

SEQ ID NO: 2936 - DNA, 22 bp, Vaccinia virus
taaagtttgattggaacatacc

SEQ ID NO: 2937 - DNA, 19 bp, Vaccinia virus
gagctcttcggtagcctca

SEQ ID NO: 2938 - DNA, 22 bp, Vaccinia virus
gaaaagcaataaaaatatttta

SEQ ID NO: 2939 - DNA, 16 bp, Vaccinia virus
tagccacagaaatgtc

SEQ ID NO: 2940 - DNA, 17 bp, Vaccinia virus
tcctcattggtaaaaga

SEQ ID NO: 2941 - DNA, 24 bp, Vaccinia virus
tccacccttgccctcagcaagaga

SEQ ID NO: 2942 - DNA, 22 bp, Vaccinia virus
cgattttcatataaatgtatga

SEQ ID NO: 2943 - DNA, 20 bp, Vaccinia virus
ccattacagtggcctggata

SEQ ID NO: 2944 - DNA, 23 bp, Vaccinia virus
gaaaaccgtctcataacaaaagg

SEQ ID NO: 2945 - DNA, 19 bp, Vaccinia virus
atgatcctaaactttttgg

SEQ ID NO: 2946 - DNA, 18 bp, Vaccinia virus
tgagctttgtaccaaaga

SEQ ID NO: 2947 - DNA, 18 bp, Vaccinia virus
cagatgaatagtatcaca

SEQ ID NO: 2948 - DNA, 19 bp, Vaccinia virus
tatgttgattctacctgtg

SEQ ID NO: 2949 - DNA, 21 bp, Vaccinia virus
agaatccatgctaaaaattaa

SEQ ID NO: 2950 - DNA, 20 bp, Vaccinia virus
ccctggtggcataaacgagt

SEQ ID NO: 2951 - DNA, 24 bp, Vaccinia virus
cagaaatctgctgcatttcacatg

SEQ ID NO: 2952 - DNA, 18 bp, Vaccinia virus
tggttggtaatggaataa

SEQ ID NO: 2953 - DNA, 19 bp, Vaccinia virus
aaaaaatggtgttttatct

SEQ ID NO: 2954 - DNA, 19 bp, Vaccinia virus
aggttaggagaaaacctca

SEQ ID NO: 2955 - DNA, 17 bp, Vaccinia virus
ctcacatggacccaaga

SEQ ID NO: 2956 - DNA, 19 bp, Vaccinia virus
gtcatataaatgagtgaaa

SEQ ID NO: 2957 - DNA, 17 bp, Vaccinia virus
tagtcacagagtggctg

SEQ ID NO: 2958 - DNA, 19 bp, Vaccinia virus
ttactagcattgcagtgtc

SEQ ID NO: 2959 - DNA, 19 bp, Vaccinia virus
ttctcatagatattttgtg

SEQ ID NO: 2960 - DNA, 18 bp, Vaccinia virus
gtctagagtgatccatcc

SEQ ID NO: 2961 - DNA, 18 bp, Vaccinia virus
atgttgacctgagctagt

SEQ ID NO: 2962 - DNA, 18 bp, Vaccinia virus
tgtagacatgaagactta

SEQ ID NO: 2963 - DNA, 18 bp, Vaccinia virus
catggccaccgcagaaca

SEQ ID NO: 2964 - DNA, 18 bp, Vaccinia virus
gaaaaggcctctgtggag

SEQ ID NO: 2965 - DNA, 21 bp, Vaccinia virus
taaaaaaaggagcaaaagtat

SEQ ID NO: 2966 - DNA, 18 bp, Vaccinia virus
tatgccgaaatagcttca

SEQ ID NO: 2967 - DNA, 17 bp, Vaccinia virus
aggcagaaggatcactt

SEQ ID NO: 2968 - DNA, 20 bp, Vaccinia virus
tagaaatagttgacttaata

SEQ ID NO: 2969 - DNA, 19 bp, Vaccinia virus
gaaaggagacagaacatta

SEQ ID NO: 2970 - DNA, 18 bp, Vaccinia virus
aaaagaaatccgaaagaa

SEQ ID NO: 2971 - DNA, 17 bp, Vaccinia virus
atttttattctctgctt

SEQ ID NO: 2972 - DNA, 18 bp, Vaccinia virus
tggaaacatgttgtggaa

SEQ ID NO: 2973 - DNA, 27 bp, Vaccinia virus
caacatcttggcttttagttactggca

SEQ ID NO: 2974 - DNA, 23 bp, Vaccinia virus
gatagacttatcatagctctata

SEQ ID NO: 2975 - DNA, 21 bp, Vaccinia virus
taaatgtttagaacctactgt

SEQ ID NO: 2976 - DNA, 20 bp, Vaccinia virus
tatgttgaaaaactgctgtg

SEQ ID NO: 2977 - DNA, 20 bp, Vaccinia virus
acctatgggcagtttatctg

SEQ ID NO: 2978 - DNA, 17 bp, Vaccinia virus
tgtgacatgaccaaaga

SEQ ID NO: 2979 - DNA, 24 bp, Vaccinia virus
ttctccaggccctcagatggcaca

SEQ ID NO: 2980 - DNA, 21 bp, Vaccinia virus
tagttctgaattaaaatatgc

SEQ ID NO: 2981 - DNA, 20 bp, Vaccinia virus
gagaacgatgctctgtgaga

SEQ ID NO: 2982 - DNA, 29 bp, Vaccinia virus
tatcatctctggaagttgagagcctccaa

SEQ ID NO: 2983 - DNA, 22 bp, Vaccinia virus
cttatctgttatgtgttcatca

SEQ ID NO: 2984 - DNA, 20 bp, Vaccinia virus
tgggccatttttccacaaca

SEQ ID NO: 2985 - DNA, 20 bp, Vaccinia virus
tatttttatctctatctcct

SEQ ID NO: 2986 - DNA, 20 bp, Vaccinia virus
caaggtccaaactgatataa

SEQ ID NO: 2987 - DNA, 21 bp, Vaccinia virus
tgcaattttttttaccaaaga

SEQ ID NO: 2988 - DNA, 21 bp, Vaccinia virus
ttattaactccttctctcttt

SEQ ID NO: 2989 - DNA, 20 bp, Vaccinia virus
ttatgcaaaaaagtatctta

SEQ ID NO: 2990 - DNA, 21 bp, Vaccinia virus
tctacctcagtttgccacaaa

SEQ ID NO: 2991 - DNA, 20 bp, Vaccinia virus
aaataaaaacaggaatatta

SEQ ID NO: 2992 - DNA, 21 bp, Vaccinia virus
tgtttctaagccattgactaa

SEQ ID NO: 2993 - DNA, 17 bp, Vaccinia virus
tagaaatagttctttaa

SEQ ID NO: 2994 - DNA, 18 bp, Vaccinia virus
ccaaagaagatccgagtt

SEQ ID NO: 2995 - DNA, 23 bp, Vaccinia virus
attaagtaatccaccatttctta

SEQ ID NO: 2996 - DNA, 23 bp, Vaccinia virus
gtctcacatttggcccaaacctc

SEQ ID NO: 2997 - DNA, 22 bp, Vaccinia virus
caggagtacctttctccacatg

SEQ ID NO: 2998 - DNA, 23 bp, Vaccinia virus
ccaagaatttatctccaaaggaa

SEQ ID NO: 2999 - DNA, 17 bp, Vaccinia virus
aggcaggataatcactt

SEQ ID NO: 3000 - DNA, 21 bp, Vaccinia virus
actgcagcctccgcttcctgt

SEQ ID NO: 3001 - DNA, 17 bp, Vaccinia virus
ttgccaagaaagacccc

SEQ ID NO: 3002 - DNA, 22 bp, Vaccinia virus
aatataaaaacagaaacataga

SEQ ID NO: 3003 - DNA, 19 bp, Vaccinia virus
ttatacttagaacttacca

SEQ ID NO: 3004 - DNA, 23 bp, Vaccinia virus
aataaatgggagttagcatttta

SEQ ID NO: 3005 - DNA, 18 bp, Vaccinia virus
tgagaaggccttattaaa

SEQ ID NO: 3006 - DNA, 23 bp, Vaccinia virus
atttgttttctctttctttcctc

SEQ ID NO: 3007 - DNA, 20 bp, Vaccinia virus
ttgcttctgaaacccctcct

SEQ ID NO: 3008 - DNA, 20 bp, Vaccinia virus
ggcaaacacctgacatggca

SEQ ID NO: 3009 - DNA, 21 bp, Vaccinia virus
aagcagaacagatacctaatt

SEQ ID NO: 3010 - DNA, 22 bp, Vaccinia virus
aggactatagaaatgcaaagaa

SEQ ID NO: 3011 - DNA, 22 bp, Vaccinia virus
aaaatattaagataactttctg

SEQ ID NO: 3012 - DNA, 19 bp, Vaccinia virus
ggcacctataataaatgac

SEQ ID NO: 3013 - DNA, 20 bp, Vaccinia virus
ttccagcctgaacccatgga

SEQ ID NO: 3014 - DNA, 16 bp, Vaccinia virus
aaaaggaaaaaagcca

SEQ ID NO: 3015 - DNA, 19 bp, Vaccinia virus
tagaattgggactttagta

SEQ ID NO: 3016 - DNA, 19 bp, Vaccinia virus
gtcatatgttaaagagcta

SEQ ID NO: 3017 - DNA, 17 bp, Vaccinia virus
atgttacatgcaccttc

SEQ ID NO: 3018 - DNA, 22 bp, Vaccinia virus
atatttctgaggctttttttgt

SEQ ID NO: 3019 - DNA, 19 bp, Vaccinia virus
gccaatgggggaattctca

SEQ ID NO: 3020 - DNA, 25 bp, Vaccinia virus
ctcaacacaccaagccttattccca

SEQ ID NO: 3021 - DNA, 20 bp, Vaccinia virus
tcacttgagaagttgttagg

SEQ ID NO: 3022 - DNA, 19 bp, Vaccinia virus
cactaccgctgtatctgta

SEQ ID NO: 3023 - DNA, 23 bp, Vaccinia virus
tacagtgaggcgagattcaccat

SEQ ID NO: 3024 - DNA, 23 bp, Vaccinia virus
cctgcccacaacttctccaaaca

SEQ ID NO: 3025 - DNA, 23 bp, Vaccinia virus
actttgggaaattcatctggtca

SEQ ID NO: 3026 - DNA, 21 bp, Vaccinia virus
tccaccctatttctggaaaaa

SEQ ID NO: 3027 - DNA, 21 bp, Vaccinia virus
cttatccatctctgtccatta

SEQ ID NO: 3028 - DNA, 21 bp, Vaccinia virus
acactgtgttccttggacctc

SEQ ID NO: 3029 - DNA, 20 bp, Vaccinia virus
cagctccaccatatttctcc

SEQ ID NO: 3030 - DNA, 19 bp, Vaccinia virus
tctgtaccttctccatcca

SEQ ID NO: 3031 - DNA, 21 bp, Vaccinia virus
gaaaagagttctaaacatggt

SEQ ID NO: 3032 - DNA, 19 bp, Vaccinia virus
aggttggaaaaggctccgc

SEQ ID NO: 3033 - DNA, 18 bp, Vaccinia virus
tgagcacgcttggaatac

SEQ ID NO: 3034 - DNA, 20 bp, Vaccinia virus
ttggaaataagtcaatggaa

SEQ ID NO: 3035 - DNA, 18 bp, Vaccinia virus
caacaaacaagagctatg

SEQ ID NO: 3036 - DNA, 19 bp, Vaccinia virus
tctcatagatactagttga

SEQ ID NO: 3037 - DNA, 23 bp, Vaccinia virus
ctgaccttgaaataaatcacttc

SEQ ID NO: 3038 - DNA, 19 bp, Vaccinia virus
taataaacgatttaatgaa

SEQ ID NO: 3039 - DNA, 16 bp, Vaccinia virus
agtttgaaatcatgcc

SEQ ID NO: 3040 - DNA, 18 bp, Vaccinia virus
cgtagatgatgtgaatga

SEQ ID NO: 3041 - DNA, 22 bp, Vaccinia virus
cagttgggccctgtaccatccc

SEQ ID NO: 3042 - DNA, 24 bp, Vaccinia virus
caagaaaaatgagaacattttcaa

SEQ ID NO: 3043 - DNA, 20 bp, Vaccinia virus
gttaggtgtcaattgatact

SEQ ID NO: 3044 - DNA, 17 bp, Vaccinia virus
tgagaggctttatgaaa

SEQ ID NO: 3045 - DNA, 23 bp, Vaccinia virus
ttaacatagaatgtttactgata

SEQ ID NO: 3046 - DNA, 22 bp, Vaccinia virus
aatacagttgcagaggagcata

SEQ ID NO: 3047 - DNA, 16 bp, Vaccinia virus
aaggtataataaactg

SEQ ID NO: 3048 - DNA, 17 bp, Vaccinia virus
tagtcacaacccaatgc

SEQ ID NO: 3049 - DNA, 17 bp, Vaccinia virus
gatggccagaagattta

SEQ ID NO: 3050 - DNA, 22 bp, Vaccinia virus
ggagtaacaaaataggacatta

SEQ ID NO: 3051 - DNA, 22 bp, Vaccinia virus
cgatgatctggccgaagagctt

SEQ ID NO: 3052 - DNA, 19 bp, Vaccinia virus
aatttgacatcacatttta

SEQ ID NO: 3053 - DNA, 18 bp, Vaccinia virus
ggaaacaaacaaaaagga

SEQ ID NO: 3054 - DNA, 19 bp, Vaccinia virus
agaaataggcgtactttaa

SEQ ID NO: 3055 - DNA, 21 bp, Vaccinia virus
atggagaatctctgggatagc

SEQ ID NO: 3056 - DNA, 18 bp, Vaccinia virus
gttctcattcttttcact

SEQ ID NO: 3057 - DNA, 21 bp, Vaccinia virus
aatttgtgatttgtttaattt

SEQ ID NO: 3058 - DNA, 18 bp, Vaccinia virus
ttctctccttctctcttc

SEQ ID NO: 3059 - DNA, 20 bp, Vaccinia virus
tagagaagggaaagacttta

SEQ ID NO: 3060 - DNA, 20 bp, Vaccinia virus
gcctatcagaagtcaattca

SEQ ID NO: 3061 - DNA, 17 bp, Vaccinia virus
gagggagtcattttatt

SEQ ID NO: 3062 - DNA, 18 bp, Vaccinia virus
tcactcaaacggaatcga

SEQ ID NO: 3063 - DNA, 22 bp, Vaccinia virus
gaatacttagtattttcacatg

SEQ ID NO: 3064 - DNA, 20 bp, Vaccinia virus
agtctaaacacaaaattcat

SEQ ID NO: 3065 - DNA, 17 bp, Vaccinia virus
ttctgtcccaccagaaa

SEQ ID NO: 3066 - DNA, 20 bp, Vaccinia virus
tagagaagggaaagacttta

SEQ ID NO: 3067 - DNA, 23 bp, Vaccinia virus
tgaatctgccagcaccataactt

SEQ ID NO: 3068 - DNA, 17 bp, Vaccinia virus
aggcaggataatcactt

SEQ ID NO: 3069 - DNA, 18 bp, Vaccinia virus
tgatgccgaggaaagact

SEQ ID NO: 3070 - DNA, 21 bp, Vaccinia virus
aatattcaatattcttaaaga

SEQ ID NO: 3071 - DNA, 18 bp, Vaccinia virus
atttctcgtgaacaccca

SEQ ID NO: 3072 - DNA, 18 bp, Vaccinia virus
aaaaatttttgtataatg

SEQ ID NO: 3073 - DNA, 19 bp, Vaccinia virus
tattttattacagattgga

SEQ ID NO: 3074 - DNA, 18 bp, Vaccinia virus
ttggaaatatcttctgtg

SEQ ID NO: 3075 - DNA, 18 bp, Vaccinia virus
ttctctccttctctcttc

SEQ ID NO: 3076 - DNA, 20 bp, Vaccinia virus
gctcgaaaaggcaaaggcta

SEQ ID NO: 3077 - DNA, 20 bp, Vaccinia virus
ttgataatgttgtgcaaagg

SEQ ID NO: 3078 - DNA, 23 bp, Vaccinia virus
caggaatacagagatttcgcatg

SEQ ID NO: 3079 - DNA, 20 bp, Vaccinia virus
gccatgagctgcatctttat

SEQ ID NO: 3080 - DNA, 21 bp, Vaccinia virus
aaagttgtgtaaagtgacgaa

SEQ ID NO: 3081 - DNA, 19 bp, Vaccinia virus
acaagcaaatgtaactcca

SEQ ID NO: 3082 - DNA, 19 bp, Vaccinia virus
cggaatttggaaaccccag

SEQ ID NO: 3083 - DNA, 21 bp, Vaccinia virus
ttctgaaataatctctggagg

SEQ ID NO: 3084 - DNA, 21 bp, Vaccinia virus
aagtgccacaaaatgaactaa

SEQ ID NO: 3085 - DNA, 17 bp, Vaccinia virus
cctaggtctggccttca

SEQ ID NO: 3086 - DNA, 24 bp, Vaccinia virus
aatgcaagaaggaacacataagta

SEQ ID NO: 3087 - DNA, 19 bp, Vaccinia virus
acagcaatcaaaacatcaa

SEQ ID NO: 3088 - DNA, 18 bp, Vaccinia virus
tctccaagaagggtgtca

SEQ ID NO: 3089 - DNA, 20 bp, Vaccinia virus
gaaactcacaaagcaatgct

SEQ ID NO: 3090 - DNA, 19 bp, Vaccinia virus
ttttggtggctcgatgtta

SEQ ID NO: 3091 - DNA, 18 bp, Vaccinia virus
tagaacatttaccgatgc

SEQ ID NO: 3092 - DNA, 24 bp, Vaccinia virus
ctattttatagccacccaggtagg

SEQ ID NO: 3093 - DNA, 20 bp, Vaccinia virus
gacagtcatgcatttctata

SEQ ID NO: 3094 - DNA, 22 bp, Vaccinia virus
gcagtgcaaacatcattttgga

SEQ ID NO: 3095 - DNA, 23 bp, Vaccinia virus
cagttaaacctagatccctccct

SEQ ID NO: 3096 - DNA, 20 bp, Vaccinia virus
gaagagaaatgccataggaa

SEQ ID NO: 3097 - DNA, 21 bp, Vaccinia virus
acaattgtcaagtatattctg

SEQ ID NO: 3098 - DNA, 24 bp, Vaccinia virus
gatgccgaggacatcttactcctg

SEQ ID NO: 3099 - DNA, 23 bp, Vaccinia virus
tcctgccaccatttctccaacca

SEQ ID NO: 3100 - DNA, 16 bp, Vaccinia virus
gatgccgaagaaggct

SEQ ID NO: 3101 - DNA, 18 bp, Vaccinia virus
tcccttccccactccatg

SEQ ID NO: 3102 - DNA, 22 bp, Vaccinia virus
agaaaacttgacattcagatga

SEQ ID NO: 3103 - DNA, 19 bp, Vaccinia virus
agcagccgtggacacaacg

SEQ ID NO: 3104 - DNA, 23 bp, Vaccinia virus
aaggttggtttatttgtatttta

SEQ ID NO: 3105 - DNA, 18 bp, Vaccinia virus
agatgcaggctcagcact

SEQ ID NO: 3106 - DNA, 19 bp, Vaccinia virus
aagtagaaatctcaaagat

SEQ ID NO: 3107 - DNA, 16 bp, Vaccinia virus
caacattttatttcca

SEQ ID NO: 3108 - DNA, 20 bp, Vaccinia virus
ataccagtggcaaatttgga

SEQ ID NO: 3109 - DNA, 23 bp, Vaccinia virus
ctattactattgcaggaatataa

SEQ ID NO: 3110 - DNA, 20 bp, Vaccinia virus
aaaagtgctgcaaaaatatt

SEQ ID NO: 3111 - DNA, 16 bp, Vaccinia virus
agtcacagatcacgcc

SEQ ID NO: 3112 - DNA, 19 bp, Vaccinia virus
gagaaaaaccatataaatg

SEQ ID NO: 3113 - DNA, 17 bp, Vaccinia virus
aggcaggataatcactt

SEQ ID NO: 3114 - DNA, 21 bp, Vaccinia virus
ctctggtgtgactaaggaaag

SEQ ID NO: 3115 - DNA, 18 bp, Vaccinia virus
atgtatatagatatgatc

SEQ ID NO: 3116 - DNA, 16 bp, Vaccinia virus
ggagtctccatcctca

SEQ ID NO: 3117 - DNA, 23 bp, Vaccinia virus
ctccagacccagatggtgtctca

SEQ ID NO: 3118 - DNA, 22 bp, Vaccinia virus
agccaacacatatggtcaatga

SEQ ID NO: 3119 - DNA, 18 bp, Vaccinia virus
cttgataaaaacaactaa

SEQ ID NO: 3120 - DNA, 20 bp, Vaccinia virus
tctacctcttctgccacaaa

SEQ ID NO: 3121 - DNA, 22 bp, Vaccinia virus
cagctggacctagctgattctc

SEQ ID NO: 3122 - DNA, 22 bp, Vaccinia virus
cttggttagtatttgattccca

SEQ ID NO: 3123 - DNA, 21 bp, Vaccinia virus
actgaaattcagaagattcac

SEQ ID NO: 3124 - DNA, 20 bp, Vaccinia virus
gaaaatggggcccttaatac

SEQ ID NO: 3125 - DNA, 20 bp, Vaccinia virus
ctagacaacatgaccctacc

SEQ ID NO: 3126 - DNA, 17 bp, Vaccinia virus
ctgcatctctcccctta

SEQ ID NO: 3127 - DNA, 20 bp, Vaccinia virus
ggtaaaggagtgttgaactc

SEQ ID NO: 3128 - DNA, 20 bp, Vaccinia virus
atgcccactgacctttttca

SEQ ID NO: 3129 - DNA, 16 bp, Vaccinia virus
agtcacagcagccgcc

SEQ ID NO: 3130 - DNA, 18 bp, Vaccinia virus
aggagtttagtatcctta

SEQ ID NO: 3131 - DNA, 21 bp, Vaccinia virus
atttttcagatctttctcttt

SEQ ID NO: 3132 - DNA, 21 bp, Vaccinia virus
taatgtgaggaaaaacacgga

SEQ ID NO: 3133 - DNA, 19 bp, Vaccinia virus
ttggaaattagaggtggaa

SEQ ID NO: 3134 - DNA, 20 bp, Vaccinia virus
aaaaggcaaaagtttgcagc

SEQ ID NO: 3135 - DNA, 21 bp, Vaccinia virus
atgcctacaaaggaaatgagt

SEQ ID NO: 3136 - DNA, 18 bp, Vaccinia virus
ttaagagaaaaaagtacc

SEQ ID NO: 3137 - DNA, 17 bp, Vaccinia virus
ctccacaacatctacca

SEQ ID NO: 3138 - DNA, 21 bp, Vaccinia virus
cagccctgccactccttcctc

SEQ ID NO: 3139 - DNA, 16 bp, Vaccinia virus
ggaaagccctgtggaa

SEQ ID NO: 3140 - DNA, 26 bp, Vaccinia virus
agaactttatttaccatgaaatgcct

SEQ ID NO: 3141 - DNA, 24 bp, Vaccinia virus
gagacagaatctttagttacttca

SEQ ID NO: 3142 - DNA, 17 bp, Vaccinia virus
cagaacaccacctctca

SEQ ID NO: 3143 - DNA, 23 bp, Vaccinia virus
caaaatggaactttaaaacagta

SEQ ID NO: 3144 - DNA, 23 bp, Vaccinia virus
caaaatggaactttaaaacagta

SEQ ID NO: 3145 - DNA, 23 bp, Vaccinia virus
caaaatggaactttaaaacagta

SEQ ID NO: 3146 - DNA, 23 bp, Vaccinia virus
caaaatggaactttaaaacagta

SEQ ID NO: 3147 - DNA, 20 bp, Vaccinia virus
tgtaaacagaaggtcttcaa

SEQ ID NO: 3148 - DNA, 19 bp, Vaccinia virus
tagcttgtgaaaccattcc

SEQ ID NO: 3149 - DNA, 23 bp, Vaccinia virus
tgatagtggcatttatcaaatgg

SEQ ID NO: 3150 - DNA, 16 bp, Vaccinia virus
aatcaacaggctcccg

SEQ ID NO: 3151 - DNA, 18 bp, Vaccinia virus
agagaacagactttaata

SEQ ID NO: 3152 - DNA, 18 bp, Vaccinia virus
gagaaagaagatatttta

SEQ ID NO: 3153 - DNA, 21 bp, Vaccinia virus
tcagggatctagaactagaaa

SEQ ID NO: 3154 - DNA, 22 bp, Vaccinia virus
tgtacagttatatttgtctata

SEQ ID NO: 3155 - DNA, 20 bp, Vaccinia virus
aggagttacaaaatatggac

SEQ ID NO: 3156 - DNA, 25 bp, Vaccinia virus
agcattaaaaaccagcagctcttca

SEQ ID NO: 3157 - DNA, 22 bp, Vaccinia virus
attattcttagatctgtagata

SEQ ID NO: 3158 - DNA, 22 bp, Vaccinia virus
taatttgaatctgaacatgtta

SEQ ID NO: 3159 - DNA, 16 bp, Vaccinia virus
aaataaaaacagtatc

SEQ ID NO: 3160 - DNA, 19 bp, Vaccinia virus
agtcacaaaaaccatgctg

SEQ ID NO: 3161 - DNA, 20 bp, Vaccinia virus
ttattcaaaggccaatgata

SEQ ID NO: 3162 - DNA, 21 bp, Vaccinia virus
atttctgggactgaatccagg

SEQ ID NO: 3163 - DNA, 20 bp, Vaccinia virus
gaaaagaacaagaaagatag

SEQ ID NO: 3164 - DNA, 19 bp, Vaccinia virus
gtttctagtgccaaactta

SEQ ID NO: 3165 - DNA, 18 bp, Vaccinia virus
atggaggcattatttcta

SEQ ID NO: 3166 - DNA, 16 bp, Vaccinia virus
agatgaggatgagcgt

SEQ ID NO: 3167 - DNA, 19 bp, Vaccinia virus
tagtcacaaagggcttacg

SEQ ID NO: 3168 - DNA, 23 bp, Vaccinia virus
ttggaaatcagcttctggaggaa

SEQ ID NO: 3169 - DNA, 18 bp, Vaccinia virus
gtggacagcattgagctc

SEQ ID NO: 3170 - DNA, 16 bp, Vaccinia virus
aatggagagacttccg

SEQ ID NO: 3171 - DNA, 18 bp, Vaccinia virus
tcacccaaacactccttc

SEQ ID NO: 3172 - DNA, 25 bp, Vaccinia virus
aagcaaagaaaaatacctaattgta

SEQ ID NO: 3173 - DNA, 18 bp, Vaccinia virus
ttctagggaaaccacaaa

SEQ ID NO: 3174 - DNA, 18 bp, Vaccinia virus
atttggctgatgatggaa

SEQ ID NO: 3175 - DNA, 16 bp, Vaccinia virus
gtgtgtcttgtgctgc

SEQ ID NO: 3176 - DNA, 21 bp, Vaccinia virus
ataaagttacacaaaggtagt

SEQ ID NO: 3177 - DNA, 17 bp, Vaccinia virus
ctcaatcagtattgcca

SEQ ID NO: 3178 - DNA, 26 bp, Vaccinia virus
gatggacccttcaagcaatttctata

SEQ ID NO: 3179 - DNA, 19 bp, Vaccinia virus
ggaccacatcagttgcaaa

SEQ ID NO: 3180 - DNA, 22 bp, Vaccinia virus
tagaaatggttgtactttaatg

SEQ ID NO: 3181 - DNA, 20 bp, Vaccinia virus
atccctgttttcggggacta

SEQ ID NO: 3182 - DNA, 17 bp, Vaccinia virus
aaaggtatatttgacta

SEQ ID NO: 3183 - DNA, 23 bp, Vaccinia virus
tagaaaatggccagattttaata

SEQ ID NO: 3184 - DNA, 26 bp, Vaccinia virus
aaccatgaaagacagagttgatctca

SEQ ID NO: 3185 - DNA, 22 bp, Vaccinia virus
aaaatgcagtttttccttcaca

SEQ ID NO: 3186 - DNA, 18 bp, Vaccinia virus
aaacaaatactgagacag

SEQ ID NO: 3187 - DNA, 19 bp, Vaccinia virus
aagaaatattacaataagg

SEQ ID NO: 3188 - DNA, 18 bp, Vaccinia virus
aacggttgccggccattg

SEQ ID NO: 3189 - DNA, 18 bp, Vaccinia virus
ctaatgaaaaggacctta

SEQ ID NO: 3190 - DNA, 19 bp, Vaccinia virus
tatttagctttggaaactt

SEQ ID NO: 3191 - DNA, 25 bp, Vaccinia virus
aatcagatcatatgaaaacaatcta

SEQ ID NO: 3192 - DNA, 18 bp, Vaccinia virus
aatgaaaagaacttccca

SEQ ID NO: 3193 - DNA, 21 bp, Vaccinia virus
aagggtgaaatttgtgtttta

SEQ ID NO: 3194 - DNA, 21 bp, Vaccinia virus
agcagatcaagcaaatgtcta

SEQ ID NO: 3195 - DNA, 23 bp, Vaccinia virus
aatattttgccttctttctttct

SEQ ID NO: 3196 - DNA, 23 bp, Vaccinia virus
ctccagacccagatggtgtctca

SEQ ID NO: 3197 - DNA, 17 bp, Vaccinia virus
agctatttgtagataaa

SEQ ID NO: 3198 - DNA, 22 bp, Vaccinia virus
attgcgtttctctttctccttc

SEQ ID NO: 3199 - DNA, 16 bp, Vaccinia virus
agccacaggagatgtc

SEQ ID NO: 3200 - DNA, 19 bp, Vaccinia virus
ccacagtgtcatcccacag

SEQ ID NO: 3201 - DNA, 23 bp, Vaccinia virus
gtccaaaagtttaactgtcctgc

SEQ ID NO: 3202 - DNA, 18 bp, Vaccinia virus
acaaagctatcacatgaa

SEQ ID NO: 3203 - DNA, 19 bp, Vaccinia virus
agcttcccattgtgtaata

SEQ ID NO: 3204 - DNA, 19 bp, Vaccinia virus
aaatcttgtgctctgcgaa

SEQ ID NO: 3205 - DNA, 19 bp, Vaccinia virus
aaataaagatagcatgtca

SEQ ID NO: 3206 - DNA, 23 bp, Vaccinia virus
tgcacagctgtttaggctataga

SEQ ID NO: 3207 - DNA, 19 bp, Vaccinia virus
ttctgaaataatttcaagc

SEQ ID NO: 3208 - DNA, 19 bp, Vaccinia virus
ttgcatgttaaatgatact

SEQ ID NO: 3209 - DNA, 22 bp, Vaccinia virus
ttctccagataagaaaatcaca

SEQ ID NO: 3210 - DNA, 23 bp, Vaccinia virus
tctccaggccccaggtgccagca

SEQ ID NO: 3211 - DNA, 20 bp, Vaccinia virus
gaaaggacatctacaccgaa

SEQ ID NO: 3212 - DNA, 20 bp, Vaccinia virus
actgcactaacccatttgtg

SEQ ID NO: 3213 - DNA, 17 bp, Vaccinia virus
agtcacagaacatctcc

SEQ ID NO: 3214 - DNA, 18 bp, Vaccinia virus
atcattgcccccaactcc

SEQ ID NO: 3215 - DNA, 18 bp, Vaccinia virus
tgttctctctctctcttt

SEQ ID NO: 3216 - DNA, 21 bp, Vaccinia virus
ttctgcagggacaccacttat

SEQ ID NO: 3217 - DNA, 19 bp, Vaccinia virus
ggtactaattcagcaccta

SEQ ID NO: 3218 - DNA, 19 bp, Vaccinia virus
agtgagccgagaccatgcc

SEQ ID NO: 3219 - DNA, 27 bp, Vaccinia virus
atagaaacagaggacgtgactttgata

SEQ ID NO: 3220 - DNA, 20 bp, Vaccinia virus
tctcataggactgtcctaga

SEQ ID NO: 3221 - DNA, 23 bp, Vaccinia virus
agcatcctttcaataaatgcctg

SEQ ID NO: 3222 - DNA, 18 bp, Vaccinia virus
atttcccgtgaacaccca

SEQ ID NO: 3223 - DNA, 17 bp, Vaccinia virus
tcatatgaagaaagcta

SEQ ID NO: 3224 - DNA, 21 bp, Vaccinia virus
tccacacatttaaaacattga

SEQ ID NO: 3225 - DNA, 22 bp, Vaccinia virus
aaagaattatattgctgacaaa

SEQ ID NO: 3226 - DNA, 20 bp, Vaccinia virus
tggtagtgcagctcatctga

SEQ ID NO: 3227 - DNA, 21 bp, Vaccinia virus
cagccccggagccattcctcc

SEQ ID NO: 3228 - DNA, 22 bp, Vaccinia virus
cctgttccccacctcccggctc

SEQ ID NO: 3229 - DNA, 21 bp, Vaccinia virus
gatggatgcatgcattatttc

SEQ ID NO: 3230 - DNA, 20 bp, Vaccinia virus
aaactgcaatttggttccac

SEQ ID NO: 3231 - DNA, 21 bp, Vaccinia virus
ctcagtgaaaacatcaattca

SEQ ID NO: 3232 - DNA, 22 bp, Vaccinia virus
agcatcatcctcaaatatctca

SEQ ID NO: 3233 - DNA, 18 bp, Vaccinia virus
acaaatcttgacgaacac

SEQ ID NO: 3234 - DNA, 19 bp, Vaccinia virus
acggatgccactattgggc

SEQ ID NO: 3235 - DNA, 20 bp, Vaccinia virus
gatattgaactgcatctgga

SEQ ID NO: 3236 - DNA, 18 bp, Vaccinia virus
ctatggacaagccaagaa

SEQ ID NO: 3237 - DNA, 20 bp, Vaccinia virus
gaagatcaagaggttacgtg

SEQ ID NO: 3238 - DNA, 18 bp, Vaccinia virus
gccaagaaaaaaagctct

SEQ ID NO: 3239 - DNA, 23 bp, Vaccinia virus
tattggcctgacagtccacctcc

SEQ ID NO: 3240 - DNA, 17 bp, Vaccinia virus
ccgtagtggctccaaag

SEQ ID NO: 3241 - DNA, 25 bp, Vaccinia virus
ctttaattttaaaaaacgtattcca

SEQ ID NO: 3242 - DNA, 23 bp, Vaccinia virus
cagctgggctccatagaccctcc

SEQ ID NO: 3243 - DNA, 20 bp, Vaccinia virus
aggcctcagtttatattgac

SEQ ID NO: 3244 - DNA, 18 bp, Vaccinia virus
agtcacagatccgatgtc

SEQ ID NO: 3245 - DNA, 18 bp, Vaccinia virus
agatgtgattacattact

SEQ ID NO: 3246 - DNA, 19 bp, Vaccinia virus
aagttagtgctctgctgaa

SEQ ID NO: 3247 - DNA, 24 bp, Vaccinia virus
atttttgggtgatgaatttacagt

SEQ ID NO: 3248 - DNA, 19 bp, Vaccinia virus
aatgaggttgttatcaata

SEQ ID NO: 3249 - DNA, 18 bp, Vaccinia virus
atgtcttctgaagactta

SEQ ID NO: 3250 - DNA, 18 bp, Vaccinia virus
ttgccaagaaaacaatct

SEQ ID NO: 3251 - DNA, 21 bp, Vaccinia virus
ccagtaggtgaagataaaggc

SEQ ID NO: 3252 - DNA, 19 bp, Vaccinia virus
attttgcctttaccaaaga

SEQ ID NO: 3253 - DNA, 22 bp, Vaccinia virus
ttctatcatcatctactacaaa

SEQ ID NO: 3254 - DNA, 21 bp, Vaccinia virus
attcttttcccctctcttttc

SEQ ID NO: 3255 - DNA, 17 bp, Vaccinia virus
agccacaggaagtgtcc

SEQ ID NO: 3256 - DNA, 22 bp, Vaccinia virus
ataaaaaaggtacaaaaagtga

SEQ ID NO: 3257 - DNA, 22 bp, Vaccinia virus
ggcagggtttttaaatagcatc

SEQ ID NO: 3258 - DNA, 19 bp, Vaccinia virus
ttctcatagataatcaaga

SEQ ID NO: 3259 - DNA, 24 bp, Vaccinia virus
actgaaacataatcaatggattca

SEQ ID NO: 3260 - DNA, 18 bp, Vaccinia virus
tagtcacaaaattttacc

SEQ ID NO: 3261 - DNA, 18 bp, Vaccinia virus
tggagttcaatgagctca

SEQ ID NO: 3262 - DNA, 21 bp, Vaccinia virus
acataggggatagtagccaac

SEQ ID NO: 3263 - DNA, 19 bp, Vaccinia virus
ccatcgtgctggtagaaga

SEQ ID NO: 3264 - DNA, 17 bp, Vaccinia virus
acagaaactatagcaga

SEQ ID NO: 3265 - DNA, 18 bp, Vaccinia virus
tgatacagcacaataact

SEQ ID NO: 3266 - DNA, 18 bp, Vaccinia virus
tgtaattcttaataccat

SEQ ID NO: 3267 - DNA, 17 bp, Vaccinia virus
ttttattcccttctctc

SEQ ID NO: 3268 - DNA, 19 bp, Vaccinia virus
tccccttcctccctccatg

SEQ ID NO: 3269 - DNA, 21 bp, Vaccinia virus
caaaacaaggcataaagaagt

SEQ ID NO: 3270 - DNA, 21 bp, Vaccinia virus
aaaagagttctaaagaaatag

SEQ ID NO: 3271 - DNA, 22 bp, Vaccinia virus
ctagacagatatccacttagta

SEQ ID NO: 3272 - DNA, 22 bp, Vaccinia virus
ggcgacagagtgagtgagactc

SEQ ID NO: 3273 - DNA, 19 bp, Vaccinia virus
aggcaggcgaattacttca

SEQ ID NO: 3274 - DNA, 27 bp, Vaccinia virus
cttgacacgagactagtcccaattcca

SEQ ID NO: 3275 - DNA, 18 bp, Vaccinia virus
aaacagtattaaccctgc

SEQ ID NO: 3276 - DNA, 17 bp, Vaccinia virus
actagaagaggaacata

SEQ ID NO: 3277 - DNA, 15 bp, Vaccinia virus
attatgagaaaggcc

SEQ ID NO: 3278 - DNA, 22 bp, Vaccinia virus
ggtggcgggtaacgccggactc

SEQ ID NO: 3279 - DNA, 20 bp, Vaccinia virus
atttatggtgagaaaaatac

SEQ ID NO: 3280 - DNA, 19 bp, Vaccinia virus
tcatagatacaatacttta

SEQ ID NO: 3281 - DNA, 18 bp, Vaccinia virus
tatcaataaatagcaaac

SEQ ID NO: 3282 - DNA, 18 bp, Vaccinia virus
cagctctcacattccttc

SEQ ID NO: 3283 - DNA, 20 bp, Vaccinia virus
cgcacgctcagcaggcatga

SEQ ID NO: 3284 - DNA, 24 bp, Vaccinia virus
aggctgaacagcaaacccagaggc

SEQ ID NO: 3285 - DNA, 23 bp, Vaccinia virus
cagatgcatctgtttcagcccta

SEQ ID NO: 3286 - DNA, 22 bp, Vaccinia virus
ccactgattttttttttctgga

SEQ ID NO: 3287 - DNA, 23 bp, Vaccinia virus
taaatgtaattttatgtactgtt

SEQ ID NO: 3288 - DNA, 23 bp, Vaccinia virus
ctctgagtattgggaagagaggc

SEQ ID NO: 3289 - DNA, 26 bp, Vaccinia virus
taaagtttacatgctacaaaaaatac

SEQ ID NO: 3290 - DNA, 24 bp, Vaccinia virus
tggaaatcgccaaatttgtagcca

SEQ ID NO: 3291 - DNA, 21 bp, Vaccinia virus
cagccccactcactccttctc

SEQ ID NO: 3292 - DNA, 18 bp, Vaccinia virus
cacctgtttaaatgtctg

SEQ ID NO: 3293 - DNA, 21 bp, Vaccinia virus
caggaatagaacttgcacatg

SEQ ID NO: 3294 - DNA, 21 bp, Vaccinia virus
cccattccctaacctccaatc

SEQ ID NO: 3295 - DNA, 21 bp, Vaccinia virus
gaaaaggaaataaaaaagcca

SEQ ID NO: 3296 - DNA, 23 bp, Vaccinia virus
aaaatattaaacctggacctgat

SEQ ID NO: 3297 - DNA, 19 bp, Vaccinia virus
gcatcccattggtgtcagt

SEQ ID NO: 3298 - DNA, 18 bp, Vaccinia virus
ggaaggcatcctgtggaa

SEQ ID NO: 3299 - DNA, 21 bp, Vaccinia virus
taatttatctgttaacatgtt

SEQ ID NO: 3300 - DNA, 21 bp, Vaccinia virus
aataataacatatacaattaa

SEQ ID NO: 3301 - DNA, 23 bp, Vaccinia virus
agactgtacaggaaacctaaggc

SEQ ID NO: 3302 - DNA, 18 bp, Vaccinia virus
ttctcttcccctctcttc

SEQ ID NO: 3303 - DNA, 21 bp, Vaccinia virus
cctacctgatattacatccta

SEQ ID NO: 3304 - DNA, 21 bp, Vaccinia virus
cctacctgatattacatccta

SEQ ID NO: 3305 - DNA, 20 bp, Vaccinia virus
ttctgatgacaaaccacaaa

SEQ ID NO: 3306 - DNA, 18 bp, Vaccinia virus
tggagatgatccgtggaa

SEQ ID NO: 3307 - DNA, 19 bp, Vaccinia virus
aaaactttatccattgaga

SEQ ID NO: 3308 - DNA, 19 bp, Vaccinia virus
tgcaggaaagtttaccaaa

SEQ ID NO: 3309 - DNA, 20 bp, Vaccinia virus
ctgtaacaaaataccacaaa

SEQ ID NO: 3310 - DNA, 16 bp, Vaccinia virus
gtaattttcaaagatg

SEQ ID NO: 3311 - DNA, 22 bp, Vaccinia virus
aacatcttcaacacagaacaca

SEQ ID NO: 3312 - DNA, 18 bp, Vaccinia virus
tattctttctttctcttc

SEQ ID NO: 3313 - DNA, 21 bp, Vaccinia virus
atcacctctggagccctttca

SEQ ID NO: 3314 - DNA, 25 bp, Vaccinia virus
ccaaaataataatgaaaataaaggc

SEQ ID NO: 3315 - DNA, 20 bp, Vaccinia virus
tccatatgtctatccactta

SEQ ID NO: 3316 - DNA, 18 bp, Vaccinia virus
atgtaaacgcccacctta

SEQ ID NO: 3317 - DNA, 17 bp, Vaccinia virus
tggaaagtgctctgtgg

SEQ ID NO: 3318 - DNA, 19 bp, Vaccinia virus
tattcctgtctttctctct

SEQ ID NO: 3319 - DNA, 20 bp, Vaccinia virus
ggaacaaaaacaggacatta

SEQ ID NO: 3320 - DNA, 17 bp, Vaccinia virus
tgatgttagaatcccac

SEQ ID NO: 3321 - DNA, 19 bp, Vaccinia virus
ttgtagtactggtaaaaga

SEQ ID NO: 3322 - DNA, 18 bp, Vaccinia virus
actagctgcttctagtca

SEQ ID NO: 3323 - DNA, 18 bp, Vaccinia virus
tattctgtctttctcctc

SEQ ID NO: 3324 - DNA, 20 bp, Vaccinia virus
ttttgtgcctctctttcttc

SEQ ID NO: 3325 - DNA, 18 bp, Vaccinia virus
cacacgtatgccatggcc

SEQ ID NO: 3326 - DNA, 19 bp, Vaccinia virus
tctccagactggtgacaca

SEQ ID NO: 3327 - DNA, 18 bp, Vaccinia virus
tattttgtttccctcttc

SEQ ID NO: 3328 - DNA, 23 bp, Vaccinia virus
aaggaattatttccacgagacaa

SEQ ID NO: 3329 - DNA, 22 bp, Vaccinia virus
accgcatttgctgctatctgtg

SEQ ID NO: 3330 - DNA, 23 bp, Vaccinia virus
aggccgacaaccaccagaagctg

SEQ ID NO: 3331 - DNA, 23 bp, Vaccinia virus
tctccggtggaaccagtgtcaca

SEQ ID NO: 3332 - DNA, 17 bp, Vaccinia virus
ctgcatcttctgccact

SEQ ID NO: 3333 - DNA, 18 bp, Vaccinia virus
ctgcattttagtccaact

SEQ ID NO: 3334 - DNA, 18 bp, Vaccinia virus
gaatgatttggagttctt

SEQ ID NO: 3335 - DNA, 24 bp, Vaccinia virus
tcaaatcccttttgtctctataca

SEQ ID NO: 3336 - DNA, 19 bp, Vaccinia virus
atatttttattttcttcct

SEQ ID NO: 3337 - DNA, 19 bp, Vaccinia virus
tgttctgcttttcctcctc

SEQ ID NO: 3338 - DNA, 19 bp, Vaccinia virus
agctcctagaggctgctca

SEQ ID NO: 3339 - DNA, 18 bp, Vaccinia virus
aatgtcatttttgttttt

SEQ ID NO: 3340 - DNA, 19 bp, Vaccinia virus
attagtagcatgagtataa

SEQ ID NO: 3341 - DNA, 16 bp, Vaccinia virus
caatggggcggtcata

SEQ ID NO: 3342 - DNA, 24 bp, Vaccinia virus
gtttataccattggattcaattca

SEQ ID NO: 3343 - DNA, 19 bp, Vaccinia virus
tgtaaaatacctctggata

SEQ ID NO: 3344 - DNA, 18 bp, Vaccinia virus
tgtctgtgtttttaaaac

SEQ ID NO: 3345 - DNA, 21 bp, Vaccinia virus
aacaaaccaaaaacggatatg

SEQ ID NO: 3346 - DNA, 20 bp, Vaccinia virus
gtcatttctgatgaaagctg

SEQ ID NO: 3347 - DNA, 19 bp, Vaccinia virus
tgtttaaaaacccaaaggc

SEQ ID NO: 3348 - DNA, 21 bp, Vaccinia virus
ggttatatacatcataaatga

SEQ ID NO: 3349 - DNA, 21 bp, Vaccinia virus
gaagtctcaaagcatcacttc

SEQ ID NO: 3350 - DNA, 17 bp, Vaccinia virus
ggagtgtgctctgggaa

SEQ ID NO: 3351 - DNA, 18 bp, Vaccinia virus
agattggttgctctggaa

SEQ ID NO: 3352 - DNA, 18 bp, Vaccinia virus
tgcttcaaaatcaaagaa

SEQ ID NO: 3353 - DNA, 19 bp, Vaccinia virus
actgaataactaaaatctc

SEQ ID NO: 3354 - DNA, 21 bp, Vaccinia virus
aatgcagggagacatttgata

SEQ ID NO: 3355 - DNA, 21 bp, Vaccinia virus
atccccctgatccaatcacct

SEQ ID NO: 3356 - DNA, 20 bp, Vaccinia virus
gaaaggacaaaataaacaca

SEQ ID NO: 3357 - DNA, 19 bp, Vaccinia virus
tggtcgacatcccacctcc

SEQ ID NO: 3358 - DNA, 19 bp, Vaccinia virus
atcagtcaccaccaattcc

SEQ ID NO: 3359 - DNA, 17 bp, Vaccinia virus
agtcacaggcaggtgcc

SEQ ID NO: 3360 - DNA, 19 bp, Vaccinia virus
aggctccgcaaatatctca

SEQ ID NO: 3361 - DNA, 23 bp, Vaccinia virus
taataacaaatgtttaattttta

SEQ ID NO: 3362 - DNA, 21 bp, Vaccinia virus
tttttgtttttccccctcttc

SEQ ID NO: 3363 - DNA, 22 bp, Vaccinia virus
actcatgatccaaaaaagatta

SEQ ID NO: 3364 - DNA, 21 bp, Vaccinia virus
tatttttatcctcaacctctt

SEQ ID NO: 3365 - DNA, 22 bp, Vaccinia virus
gaaatgggtcatactctgtgga

SEQ ID NO: 3366 - DNA, 22 bp, Vaccinia virus
tgataccaacttgagataactt

SEQ ID NO: 3367 - DNA, 19 bp, Vaccinia virus
gtgagcagactgctataga

SEQ ID NO: 3368 - DNA, 18 bp, Vaccinia virus
agataaatgtgtgtcaca

SEQ ID NO: 3369 - DNA, 18 bp, Vaccinia virus
atacttaataaatgacgt

SEQ ID NO: 3370 - DNA, 21 bp, Vaccinia virus
gaaaagagtttctgcaagata

SEQ ID NO: 3371 - DNA, 17 bp, Vaccinia virus
aggcagaaggatcactt

SEQ ID NO: 3372 - DNA, 20 bp, Vaccinia virus
atcaacaaaaaggaggacca

SEQ ID NO: 3373 - DNA, 17 bp, Vaccinia virus
tctgcatccattccact

SEQ ID NO: 3374 - DNA, 22 bp, Vaccinia virus
cagctccgaccacaccatcctc

SEQ ID NO: 3375 - DNA, 18 bp, Vaccinia virus
agtggcgattcaaagatg

SEQ ID NO: 3376 - DNA, 20 bp, Vaccinia virus
ttgtgtgatttcgtaccaaa

SEQ ID NO: 3377 - DNA, 18 bp, Vaccinia virus
cagctcaaaaacaacaac

SEQ ID NO: 3378 - DNA, 18 bp, Vaccinia virus
gcctcagaaacataagtg

SEQ ID NO: 3379 - DNA, 23 bp, Vaccinia virus
aggctggatgaagccaggggcta

SEQ ID NO: 3380 - DNA, 20 bp, Vaccinia virus
atgaaaccatgcactttgta

SEQ ID NO: 3381 - DNA, 18 bp, Vaccinia virus
tagtcacatggccacacc

SEQ ID NO: 3382 - DNA, 20 bp, Vaccinia virus
tggaggggtgctctgtggaa

SEQ ID NO: 3383 - DNA, 22 bp, Vaccinia virus
tgattcaacaatcttactcctg

SEQ ID NO: 3384 - DNA, 15 bp, Vaccinia virus
aggggagtgttctca

SEQ ID NO: 3385 - DNA, 17 bp, Vaccinia virus
aggcagaagaatcactt

SEQ ID NO: 3386 - DNA, 21 bp, Vaccinia virus
aagggaatgtttaagccattt

SEQ ID NO: 3387 - DNA, 21 bp, Vaccinia virus
ccacccttcactgtgctgcgg

SEQ ID NO: 3388 - DNA, 19 bp, Vaccinia virus
tgatagctgataagactta

SEQ ID NO: 3389 - DNA, 18 bp, Vaccinia virus
cagtcactaaaaacaatc

SEQ ID NO: 3390 - DNA, 20 bp, Vaccinia virus
tggaaattgtttctgtagaa

SEQ ID NO: 3391 - DNA, 20 bp, Vaccinia virus
tgatctcgtcaggagactta

SEQ ID NO: 3392 - DNA, 22 bp, Vaccinia virus
aatgcttaggaatcattttata

SEQ ID NO: 3393 - DNA, 17 bp, Vaccinia virus
cccaggaaaacatggat

SEQ ID NO: 3394 - DNA, 17 bp, Vaccinia virus
tattttctttccctctc

SEQ ID NO: 3395 - DNA, 22 bp, Vaccinia virus
aaagaaataaacttttggacag

SEQ ID NO: 3396 - DNA, 25 bp, Vaccinia virus
tgccaaaaaaacaggtactcttcta

SEQ ID NO: 3397 - DNA, 25 bp, Vaccinia virus
tgccaaaaaaacaggtactcttcta

SEQ ID NO: 3398 - DNA, 20 bp, Vaccinia virus
gagccaaaagccagagccta

SEQ ID NO: 3399 - DNA, 17 bp, Vaccinia virus
ctctggaaagccttcaa

SEQ ID NO: 3400 - DNA, 21 bp, Vaccinia virus
ggataccgttttcaacttgga

SEQ ID NO: 3401 - DNA, 21 bp, Vaccinia virus
gaagcagaagatactacttta

SEQ ID NO: 3402 - DNA, 17 bp, Vaccinia virus
ggcatctacatggcatc

SEQ ID NO: 3403 - DNA, 19 bp, Vaccinia virus
ggcatcttaacatggcatt

SEQ ID NO: 3404 - DNA, 20 bp, Vaccinia virus
agcatatgaagacaggacat

SEQ ID NO: 3405 - DNA, 21 bp, Vaccinia virus
taaaaaaaggagcaaaagtat

SEQ ID NO: 3406 - DNA, 21 bp, Vaccinia virus
taaaaaaaggagcaaaagtat

SEQ ID NO: 3407 - DNA, 18 bp, Vaccinia virus
tgtccttgttatcacttc

SEQ ID NO: 3408 - DNA, 18 bp, Vaccinia virus
gtctgaaccgatatttct

SEQ ID NO: 3409 - DNA, 21 bp, Vaccinia virus
agcatcctgattaaatgtctg

SEQ ID NO: 3410 - DNA, 24 bp, Vaccinia virus
gagaaagagcaggtgaaatatttt

SEQ ID NO: 3411 - DNA, 20 bp, Vaccinia virus
agctcagagctggtctgcca

SEQ ID NO: 3412 - DNA, 17 bp, Vaccinia virus
aagtttctttgtgttca

SEQ ID NO: 3413 - DNA, 17 bp, Vaccinia virus
gaaaatggatttgtagc

SEQ ID NO: 3414 - DNA, 18 bp, Vaccinia virus
gcaaaaggcaacattgtt

SEQ ID NO: 3415 - DNA, 17 bp, Vaccinia virus
ggtccatgaactaggaa

SEQ ID NO: 3416 - DNA, 21 bp, Vaccinia virus
tgatctggcttggcagactta

SEQ ID NO: 3417 - DNA, 23 bp, Vaccinia virus
tcctggtgattcttctccaatca

SEQ ID NO: 3418 - DNA, 16 bp, Vaccinia virus
tccccttctccactcc

SEQ ID NO: 3419 - DNA, 16 bp, Vaccinia virus
caatgagtggatcatg

SEQ ID NO: 3420 - DNA, 19 bp, Vaccinia virus
ggcaggtaacattgagctc

SEQ ID NO: 3421 - DNA, 22 bp, Vaccinia virus
tctggaaaacaacacacggtga

SEQ ID NO: 3422 - DNA, 17 bp, Vaccinia virus
gccaatcaagaccagaa

SEQ ID NO: 3423 - DNA, 19 bp, Vaccinia virus
agtcacagaaggactcgcc

SEQ ID NO: 3424 - DNA, 25 bp, Vaccinia virus
gacacctggctgagccggaacagca

SEQ ID NO: 3425 - DNA, 24 bp, Vaccinia virus
gatgccgaggacatcttactcctg

SEQ ID NO: 3426 - DNA, 23 bp, Vaccinia virus
tcctgccaccatttctccaacca

SEQ ID NO: 3427 - DNA, 20 bp, Vaccinia virus
aaacgatgatgatgttaacc

SEQ ID NO: 3428 - DNA, 22 bp, Vaccinia virus
aacatcatatattttgatgtta

SEQ ID NO: 3429 - DNA, 19 bp, Vaccinia virus
gccaaagccacaacttgga

SEQ ID NO: 3430 - DNA, 18 bp, Vaccinia virus
agatgaaaccatggaagc

SEQ ID NO: 3431 - DNA, 19 bp, Vaccinia virus
aggccacgggagccgaggc

SEQ ID NO: 3432 - DNA, 19 bp, Vaccinia virus
ctaattcttcaattcttaa

SEQ ID NO: 3433 - DNA, 19 bp, Vaccinia virus
gcttaagccattatttctg

SEQ ID NO: 3434 - DNA, 23 bp, Vaccinia virus
gaaagaagaaacaatagaaaagg

SEQ ID NO: 3435 - DNA, 23 bp, Vaccinia virus
aatatttttattctttgattctt

SEQ ID NO: 3436 - DNA, 22 bp, Vaccinia virus
tatttttattctttgattcttc

SEQ ID NO: 3437 - DNA, 20 bp, Vaccinia virus
gaagcagaaagaggttactt

SEQ ID NO: 3438 - DNA, 22 bp, Vaccinia virus
atggagaaaattagcaatgctg

SEQ ID NO: 3439 - DNA, 15 bp, Vaccinia virus
gccaactgcagtttg

SEQ ID NO: 3440 - DNA, 17 bp, Vaccinia virus
tgctaatgccaaactta

SEQ ID NO: 3441 - DNA, 18 bp, Vaccinia virus
aaaggtatttgggaaact

SEQ ID NO: 3442 - DNA, 22 bp, Vaccinia virus
ctttgtgtttttggtttaccct

SEQ ID NO: 3443 - DNA, 18 bp, Vaccinia virus
gcaaaaggcaacattgtt

SEQ ID NO: 3444 - DNA, 17 bp, Vaccinia virus
ggtccatgaactaggaa

SEQ ID NO: 3445 - DNA, 21 bp, Vaccinia virus
tgatctggcttggcagactta

SEQ ID NO: 3446 - DNA, 17 bp, Vaccinia virus
ctccacaacatctacca

SEQ ID NO: 3447 - DNA, 20 bp, Vaccinia virus
gcgagtgcctgtaatctccg

SEQ ID NO: 3448 - DNA, 18 bp, Vaccinia virus
cctgatgtaggtcttatt

SEQ ID NO: 3449 - DNA, 22 bp, Vaccinia virus
tcctacctatgtcttctccaat

SEQ ID NO: 3450 - DNA, 17 bp, Vaccinia virus
gctgactactaaaactc

SEQ ID NO: 3451 - DNA, 23 bp, Vaccinia virus
gaaaaacaaattcttaaatttca

SEQ ID NO: 3452 - DNA, 19 bp, Vaccinia virus
ttcctattatatggtatcc

SEQ ID NO: 3453 - DNA, 21 bp, Vaccinia virus
agcactgctgtaaatgtctag

SEQ ID NO: 3454 - DNA, 19 bp, Vaccinia virus
attctagaaatggtgagaa

SEQ ID NO: 3455 - DNA, 18 bp, Vaccinia virus
ccgtaaattacttcagag

SEQ ID NO: 3456 - DNA, 21 bp, Vaccinia virus
ttttttgagaaaaattttgca

SEQ ID NO: 3457 - DNA, 19 bp, Vaccinia virus
ctgcaggtctgggctgcca

SEQ ID NO: 3458 - DNA, 16 bp, Vaccinia virus
ccaggaacactccttc

SEQ ID NO: 3459 - DNA, 19 bp, Vaccinia virus
ttctgttgcctaaggcagc

SEQ ID NO: 3460 - DNA, 21 bp, Vaccinia virus
gctttaaaactaattacttca

SEQ ID NO: 3461 - DNA, 19 bp, Vaccinia virus
tagaagagagagactttaa

SEQ ID NO: 3462 - DNA, 23 bp, Vaccinia virus
ctccagacccagatggtgtctca

SEQ ID NO: 3463 - DNA, 19 bp, Vaccinia virus
ttgcatgttaaatgatact

SEQ ID NO: 3464 - DNA, 23 bp, Vaccinia virus
catttaggaagcaagatgtctag

SEQ ID NO: 3465 - DNA, 24 bp, Vaccinia virus
tattttttaaaagtctttctctct

SEQ ID NO: 3466 - DNA, 19 bp, Vaccinia virus
aatgatctagtcagaagct

SEQ ID NO: 3467 - DNA, 18 bp, Vaccinia virus
tctgcatccatgtactcc

SEQ ID NO: 3468 - DNA, 18 bp, Vaccinia virus
cacacgtatgccatggcc

SEQ ID NO: 3469 - DNA, 21 bp, Vaccinia virus
atgacttggaactgaactaac

SEQ ID NO: 3470 - DNA, 22 bp, Vaccinia virus
gggcacatagagctataaataa

SEQ ID NO: 3471 - DNA, 16 bp, Vaccinia virus
agaaaactttccattc

SEQ ID NO: 3472 - DNA, 22 bp, Vaccinia virus
caactgaggtctgtaagactta

SEQ ID NO: 3473 - DNA, 17 bp, Vaccinia virus
attcaaaacacacattc

SEQ ID NO: 3474 - DNA, 20 bp, Vaccinia virus
aaggggcccccatgggacaa

SEQ ID NO: 3475 - DNA, 18 bp, Vaccinia virus
gaagttcacaggtatatc

SEQ ID NO: 3476 - DNA, 21 bp, Vaccinia virus
tcttagaagaaaacatagacg

SEQ ID NO: 3477 - DNA, 16 bp, Vaccinia virus
agtcatgatcatgccg

SEQ ID NO: 3478 - DNA, 17 bp, Vaccinia virus
gaaatgagtctgtggga

SEQ ID NO: 3479 - DNA, 22 bp, Vaccinia virus
ccaccaccaatggtcaagatat

SEQ ID NO: 3480 - DNA, 20 bp, Vaccinia virus
gctaatgggctgactactca

SEQ ID NO: 3481 - DNA, 23 bp, Vaccinia virus
aggcctcagagggccctagggac

SEQ ID NO: 3482 - DNA, 17 bp, Vaccinia virus
cccctccacctgctcca

SEQ ID NO: 3483 - DNA, 17 bp, Vaccinia virus
cagaggcatcttctgga

SEQ ID NO: 3484 - DNA, 21 bp, Vaccinia virus
gaaacaaatacccagaagaca

SEQ ID NO: 3485 - DNA, 21 bp, Vaccinia virus
gcatctgttcaggacaacatc

SEQ ID NO: 3486 - DNA, 21 bp, Vaccinia virus
aaaaagcaagtatcatttgga

SEQ ID NO: 3487 - DNA, 22 bp, Vaccinia virus
cagctccgaccacaccatcctc

SEQ ID NO: 3488 - DNA, 16 bp, Vaccinia virus
gatcctgaaatcaagg

SEQ ID NO: 3489 - DNA, 20 bp, Vaccinia virus
agctcctaggaattctctca

SEQ ID NO: 3490 - DNA, 19 bp, Vaccinia virus
agctcctagaggctgctca

SEQ ID NO: 3491 - DNA, 19 bp, Vaccinia virus
gtttctaaagagtcttcaa

SEQ ID NO: 3492 - DNA, 18 bp, Vaccinia virus
gaaaacaagagtagaggc

SEQ ID NO: 3493 - DNA, 18 bp, Vaccinia virus
ctctggaaaggtctccaa

SEQ ID NO: 3494 - DNA, 18 bp, Vaccinia virus
gaaaaggcctctgtggag

SEQ ID NO: 3495 - DNA, 19 bp, Vaccinia virus
ttttggtggctcgatgtta

SEQ ID NO: 3496 - DNA, 18 bp, Vaccinia virus
atttcccgtgaacaccca

SEQ ID NO: 3497 - DNA, 18 bp, Vaccinia virus
gcgattagaaaaacacta

SEQ ID NO: 3498 - DNA, 19 bp, Vaccinia virus
atggacttcttcatctgta

SEQ ID NO: 3499 - DNA, 22 bp, Vaccinia virus
tctggatttcaccactcagagg

SEQ ID NO: 3500 - DNA, 23 bp, Vaccinia virus
gtaattggaaaaaatccaataaa

SEQ ID NO: 3501 - DNA, 18 bp, Vaccinia virus
atctctattctacattta

SEQ ID NO: 3502 - DNA, 21 bp, Vaccinia virus
gttaaatgtgatgaatactgt

SEQ ID NO: 3503 - DNA, 20 bp, Vaccinia virus
ttgcaaggaaggcctaatca

SEQ ID NO: 3504 - DNA, 22 bp, Vaccinia virus
atgaaatgatttttataattct

SEQ ID NO: 3505 - DNA, 18 bp, Vaccinia virus
aaaggtgtatttaaacta

SEQ ID NO: 3506 - DNA, 22 bp, Vaccinia virus
aatcatctcaccccgaaatgca

SEQ ID NO: 3507 - DNA, 26 bp, Vaccinia virus
cattaaaaagaaaatattgaaaggaa

SEQ ID NO: 3508 - DNA, 19 bp, Vaccinia virus
aaataatcaaaacccaaca

SEQ ID NO: 3509 - DNA, 20 bp, Vaccinia virus
ttcctattataattacatct

SEQ ID NO: 3510 - DNA, 21 bp, Vaccinia virus
cagctctggccacaatcctcc

SEQ ID NO: 3511 - DNA, 19 bp, Vaccinia virus
gcagagggaaccagcttca

SEQ ID NO: 3512 - DNA, 16 bp, Vaccinia virus
tctacgatgctacaaa

SEQ ID NO: 3513 - DNA, 19 bp, Vaccinia virus
aattgttgcctagtcctgc

SEQ ID NO: 3514 - DNA, 19 bp, Vaccinia virus
aatgtcttagttgtacaaa

SEQ ID NO: 3515 - DNA, 19 bp, Vaccinia virus
gtgactgtggagcctgaga

SEQ ID NO: 3516 - DNA, 19 bp, Vaccinia virus
atttttgttatctctcttc

SEQ ID NO: 3517 - DNA, 19 bp, Vaccinia virus
tagtcacaaatcagaactg

SEQ ID NO: 3518 - DNA, 18 bp, Vaccinia virus
tataccttagaacattga

SEQ ID NO: 3519 - DNA, 17 bp, Vaccinia virus
aggcagaagaatcactt

SEQ ID NO: 3520 - DNA, 18 bp, Vaccinia virus
gagaataaaaataattta

SEQ ID NO: 3521 - DNA, 22 bp, Vaccinia virus
atgcctataattaggaaggagt

SEQ ID NO: 3522 - DNA, 19 bp, Vaccinia virus
cgtatgattttatttcata

SEQ ID NO: 3523 - DNA, 19 bp, Vaccinia virus
tcccctctgtgtctccatg

SEQ ID NO: 3524 - DNA, 22 bp, Vaccinia virus
ttgtgtgagaggaacccaaaga

SEQ ID NO: 3525 - DNA, 18 bp, Vaccinia virus
agaaaagaagacttcaat

SEQ ID NO: 3526 - DNA, 23 bp, Vaccinia virus
aactaaactacttgttgtgttga

SEQ ID NO: 3527 - DNA, 19 bp, Vaccinia virus
tagaaatagagatgcttta

SEQ ID NO: 3528 - DNA, 19 bp, Vaccinia virus
ggtgacagagtaggtgctc

SEQ ID NO: 3529 - DNA, 23 bp, Vaccinia virus
cggtggttaaaacaacaataata

SEQ ID NO: 3530 - DNA, 20 bp, Vaccinia virus
tagagaagggaaagacttta

SEQ ID NO: 3531 - DNA, 23 bp, Vaccinia virus
tgaatctgccagcaccagaactt

SEQ ID NO: 3532 - DNA, 19 bp, Vaccinia virus
aatggtcatcttatcaata

SEQ ID NO: 3533 - DNA, 22 bp, Vaccinia virus
aattaatgacagctttgaagat

SEQ ID NO: 3534 - DNA, 23 bp, Vaccinia virus
atgcctacagtgtctgtattaga

SEQ ID NO: 3535 - DNA, 20 bp, Vaccinia virus
gaaagcacaaaatttgtagc

SEQ ID NO: 3536 - DNA, 16 bp, Vaccinia virus
aaaggaatcacatgaa

SEQ ID NO: 3537 - DNA, 18 bp, Vaccinia virus
ttcccctccatctgatcc

SEQ ID NO: 3538 - DNA, 16 bp, Vaccinia virus
actaaaactgaatttg

SEQ ID NO: 3539 - DNA, 20 bp, Vaccinia virus
gtcacagattttgaaagcta

SEQ ID NO: 3540 - DNA, 18 bp, Vaccinia virus
ggcaaagtctcacctgaa

SEQ ID NO: 3541 - DNA, 24 bp, Vaccinia virus
acaaatcctacagtcaatagctaa

SEQ ID NO: 3542 - DNA, 20 bp, Vaccinia virus
gaatactaacaggtatttca

SEQ ID NO: 3543 - DNA, 22 bp, Vaccinia virus
gtatgtcaaagaataaattagt

SEQ ID NO: 3544 - DNA, 18 bp, Vaccinia virus
tcctcacttctccatcca

SEQ ID NO: 3545 - DNA, 19 bp, Vaccinia virus
aaatggcaaacaggtatat

SEQ ID NO: 3546 - DNA, 22 bp, Vaccinia virus
atgatcctgaagaaaaaggtga

SEQ ID NO: 3547 - DNA, 23 bp, Vaccinia virus
tatgtctgcattgaaaagaacca

SEQ ID NO: 3548 - DNA, 22 bp, Vaccinia virus
aaccattagacaaaactcttct

SEQ ID NO: 3549 - DNA, 21 bp, Vaccinia virus
gctgaggtcacagccggaggc

SEQ ID NO: 3550 - DNA, 17 bp, Vaccinia virus
tcccctctgccacccca

SEQ ID NO: 3551 - DNA, 17 bp, Vaccinia virus
agatgtggctacaacat

SEQ ID NO: 3552 - DNA, 21 bp, Vaccinia virus
ttggaaattgaagctgtagag

SEQ ID NO: 3553 - DNA, 21 bp, Vaccinia virus
tatatcaggtcataaataata

SEQ ID NO: 3554 - DNA, 19 bp, Vaccinia virus
taggttgatacatgtatca

SEQ ID NO: 3555 - DNA, 19 bp, Vaccinia virus
atctctgttctctaagcac

SEQ ID NO: 3556 - DNA, 20 bp, Vaccinia virus
tagttcaagtaaacacaatg

SEQ ID NO: 3557 - DNA, 23 bp, Vaccinia virus
aagtatactactctcaaaggtgt

SEQ ID NO: 3558 - DNA, 18 bp, Vaccinia virus
gctaatgaaagagattct

SEQ ID NO: 3559 - DNA, 23 bp, Vaccinia virus
aaaatttttctaaaactccatca

SEQ ID NO: 3560 - DNA, 18 bp, Vaccinia virus
accaactggggaactgtg

SEQ ID NO: 3561 - DNA, 19 bp, Vaccinia virus
atatcacagagcctgggag

SEQ ID NO: 3562 - DNA, 20 bp, Vaccinia virus
tttggaatgtatcatatgta

SEQ ID NO: 3563 - DNA, 18 bp, Vaccinia virus
cagaggcgccatcttgga

SEQ ID NO: 3564 - DNA, 18 bp, Vaccinia virus
atgatgtaaatccaccca

SEQ ID NO: 3565 - DNA, 22 bp, Vaccinia virus
ggaagggaaaaatttatagcta

SEQ ID NO: 3566 - DNA, 20 bp, Vaccinia virus
tgatgtctgaagataatgct

SEQ ID NO: 3567 - DNA, 19 bp, Vaccinia virus
tattttcttttctttcttc

SEQ ID NO: 3568 - DNA, 18 bp, Vaccinia virus
ggtacttttctcatcaca

SEQ ID NO: 3569 - DNA, 20 bp, Vaccinia virus
ttgtgtgaaattttgtcgaa

SEQ ID NO: 3570 - DNA, 17 bp, Vaccinia virus
gtcatatgacagggctg

SEQ ID NO: 3571 - DNA, 16 bp, Vaccinia virus
attgaaactgctagtg

SEQ ID NO: 3572 - DNA, 20 bp, Vaccinia virus
ggtaatttaagtgttgaagt

SEQ ID NO: 3573 - DNA, 20 bp, Vaccinia virus
attttaatacacttccctca

SEQ ID NO: 3574 - DNA, 25 bp, Vaccinia virus
tcctgcaaaccaccttctccaatca

SEQ ID NO: 3575 - DNA, 19 bp, Vaccinia virus
gaatatttacacaatgcct

SEQ ID NO: 3576 - DNA, 23 bp, Vaccinia virus
ctccagacccagatggtgtctca

SEQ ID NO: 3577 - DNA, 22 bp, Vaccinia virus
acagtgttcatagtttatatta

SEQ ID NO: 3578 - DNA, 18 bp, Vaccinia virus
ttgtattagtatattcta

SEQ ID NO: 3579 - DNA, 20 bp, Vaccinia virus
atgaagcaaacacacgtagg

SEQ ID NO: 3580 - DNA, 20 bp, Vaccinia virus
tcgtgggcccgcacttcata

SEQ ID NO: 3581 - DNA, 17 bp, Vaccinia virus
tctcagaatatgtccat

SEQ ID NO: 3582 - DNA, 18 bp, Vaccinia virus
gcttctacgactccgcca

SEQ ID NO: 3583 - DNA, 24 bp, Vaccinia virus
ataaaaaaacaaaaatggaaatga

SEQ ID NO: 3584 - DNA, 24 bp, Vaccinia virus
tgaaaaaggagagatcatcagcca

SEQ ID NO: 3585 - DNA, 19 bp, Vaccinia virus
acttaccgatagtttcagt

SEQ ID NO: 3586 - DNA, 20 bp, Vaccinia virus
tccaccctttgtgctttggt

SEQ ID NO: 3587 - DNA, 19 bp, Vaccinia virus
aatttgacatcacatttta

SEQ ID NO: 3588 - DNA, 23 bp, Vaccinia virus
ggaaaggacaaaatggagagtga

SEQ ID NO: 3589 - DNA, 22 bp, Vaccinia virus
aagacatgtgatttgtatttta

SEQ ID NO: 3590 - DNA, 23 bp, Vaccinia virus
ccactgtgggaaccaaattggat

SEQ ID NO: 3591 - DNA, 17 bp, Vaccinia virus
ggtcatagactatggaa

SEQ ID NO: 3592 - DNA, 18 bp, Vaccinia virus
agccacgtgagccatgcc

SEQ ID NO: 3593 - DNA, 16 bp, Vaccinia virus
tcccagtattaaacct

SEQ ID NO: 3594 - DNA, 22 bp, Vaccinia virus
agaatatcacattattcaatgc

SEQ ID NO: 3595 - DNA, 20 bp, Vaccinia virus
agaagaaaagtttgaaacca

SEQ ID NO: 3596 - DNA, 20 bp, Vaccinia virus
tgctgtctctgcagtactga

SEQ ID NO: 3597 - DNA, 22 bp, Vaccinia virus
tgatgccctgtcctcacctctg

SEQ ID NO: 3598 - DNA, 19 bp, Vaccinia virus
caacaagcggggggtcata

SEQ ID NO: 3599 - DNA, 19 bp, Vaccinia virus
aatgacttggggatgatgc

SEQ ID NO: 3600 - DNA, 19 bp, Vaccinia virus
cataatattttaaaacatt

SEQ ID NO: 3601 - DNA, 18 bp, Vaccinia virus
ctccagagtgggtgtcca

SEQ ID NO: 3602 - DNA, 20 bp, Vaccinia virus
tagagaagggaaagacttta

SEQ ID NO: 3603 - DNA, 23 bp, Vaccinia virus
tgaatctgccagcagcagaactt

SEQ ID NO: 3604 - DNA, 18 bp, Vaccinia virus
agtcacttctccatcaca

SEQ ID NO: 3605 - DNA, 18 bp, Vaccinia virus
cagatgcagagaaagcta

SEQ ID NO: 3606 - DNA, 21 bp, Vaccinia virus
cctgctccctacttcctggca

SEQ ID NO: 3607 - DNA, 20 bp, Vaccinia virus
cattaaaaaaaaacatgccg

SEQ ID NO: 3608 - DNA, 21 bp, Vaccinia virus
ctaatgaagagaatatttaac

SEQ ID NO: 3609 - DNA, 20 bp, Vaccinia virus
gaaagagggatgctacacgg

SEQ ID NO: 3610 - DNA, 19 bp, Vaccinia virus
ctcccgagatggtgtcaca

SEQ ID NO: 3611 - DNA, 19 bp, Vaccinia virus
ctcccgagatggtgtcaca

SEQ ID NO: 3612 - DNA, 18 bp, Vaccinia virus
ctagacaattttttttag

SEQ ID NO: 3613 - DNA, 21 bp, Vaccinia virus
gaaaaggaaaagtttacctgc

SEQ ID NO: 3614 - DNA, 17 bp, Vaccinia virus
gaaaaggaaagtagcta

SEQ ID NO: 3615 - DNA, 22 bp, Vaccinia virus
tgacaccaacttttgagattta

SEQ ID NO: 3616 - DNA, 20 bp, Vaccinia virus
tgtctgctctgtaccagaga

SEQ ID NO: 3617 - DNA, 19 bp, Vaccinia virus
tccaaccacattggtaaaa

SEQ ID NO: 3618 - DNA, 15 bp, Vaccinia virus
ctcaggatccataga

SEQ ID NO: 3619 - DNA, 20 bp, Vaccinia virus
aacaaattgcatggatttgt

SEQ ID NO: 3620 - DNA, 21 bp, Vaccinia virus
gaatatgggctacttcatatg

SEQ ID NO: 3621 - DNA, 20 bp, Vaccinia virus
ttctcataaatccccgccca

SEQ ID NO: 3622 - DNA, 18 bp, Vaccinia virus
cactcaagtcattaggga

SEQ ID NO: 3623 - DNA, 17 bp, Vaccinia virus
aagggactatttgtatt

SEQ ID NO: 3624 - DNA, 23 bp, Vaccinia virus
aactaaacctaatgctgctgtta

SEQ ID NO: 3625 - DNA, 20 bp, Vaccinia virus
agtctttaaaatatattctg

SEQ ID NO: 3626 - DNA, 21 bp, Vaccinia virus
acttaaggatccttctagtca

SEQ ID NO: 3627 - DNA, 17 bp, Vaccinia virus
ggaaacagaaacataga

SEQ ID NO: 3628 - DNA, 22 bp, Vaccinia virus
gccagtaatagtcaaattaacc

SEQ ID NO: 3629 - DNA, 19 bp, Vaccinia virus
ccaagttagatgtcatcaa

SEQ ID NO: 3630 - DNA, 21 bp, Vaccinia virus
ctcaacaattttgtattccca

SEQ ID NO: 3631 - DNA, 23 bp, Vaccinia virus
ttctaagtagttaaaattagaaa

SEQ ID NO: 3632 - DNA, 22 bp, Vaccinia virus
ccgctaatttttgtatttttgg

SEQ ID NO: 3633 - DNA, 18 bp, Vaccinia virus
agaccatgcatactgata

SEQ ID NO: 3634 - DNA, 20 bp, Vaccinia virus
attctgtgggctgatgagaa

SEQ ID NO: 3635 - DNA, 18 bp, Vaccinia virus
attttaccttctctcttt

SEQ ID NO: 3636 - DNA, 19 bp, Vaccinia virus
tgaggccccagaggactta

SEQ ID NO: 3637 - DNA, 23 bp, Vaccinia virus
acatcatctgttcttggacctca

SEQ ID NO: 3638 - DNA, 19 bp, Vaccinia virus
gcatttagtagacaccacg

SEQ ID NO: 3639 - DNA, 20 bp, Vaccinia virus
cagacatgtgcccagcacct

SEQ ID NO: 3640 - DNA, 20 bp, Vaccinia virus
tatgttgaattatgtcagtg

SEQ ID NO: 3641 - DNA, 23 bp, Vaccinia virus
ttatcacatggtcaagtaccttg

SEQ ID NO: 3642 - DNA, 26 bp, Vaccinia virus
atccaactagttgctggtctctatca

SEQ ID NO: 3643 - DNA, 20 bp, Vaccinia virus
agctgcaaacacagagccca

SEQ ID NO: 3644 - DNA, 23 bp, Vaccinia virus
tacagtctcacactgctatcgta

SEQ ID NO: 3645 - DNA, 18 bp, Vaccinia virus
agcaagatgggtaacatc

SEQ ID NO: 3646 - DNA, 20 bp, Vaccinia virus
aggctgatgccccaaaaggc

SEQ ID NO: 3647 - DNA, 21 bp, Vaccinia virus
tctgtaacaaattaccacaaa

SEQ ID NO: 3648 - DNA, 22 bp, Vaccinia virus
ctcagcagagacagaccccaga

SEQ ID NO: 3649 - DNA, 20 bp, Vaccinia virus
gcactttcaaagaatcatcc

SEQ ID NO: 3650 - DNA, 18 bp, Vaccinia virus
agctgggcctagtcaact

SEQ ID NO: 3651 - DNA, 19 bp, Vaccinia virus
gtctacaattcccaaaaga

SEQ ID NO: 3652 - DNA, 21 bp, Vaccinia virus
tcagggatctagaactagaaa

SEQ ID NO: 3653 - DNA, 24 bp, Vaccinia virus
tattttcttcccctacctctcttc

SEQ ID NO: 3654 - DNA, 17 bp, Vaccinia virus
cactgggacggaatcgg

SEQ ID NO: 3655 - DNA, 18 bp, Vaccinia virus
ttttttattaaacgatgt

SEQ ID NO: 3656 - DNA, 18 bp, Vaccinia virus
tgggaggacaaaggcagt

SEQ ID NO: 3657 - DNA, 20 bp, Vaccinia virus
gtgactgtaatatactagag

SEQ ID NO: 3658 - DNA, 19 bp, Vaccinia virus
tctgttttttctaccctag

SEQ ID NO: 3659 - DNA, 21 bp, Vaccinia virus
tggaaaagaatccctgcagcc

SEQ ID NO: 3660 - DNA, 17 bp, Vaccinia virus
agccacagaggcctgcc

SEQ ID NO: 3661 - DNA, 19 bp, Vaccinia virus
tgtctatctcaactctatt

SEQ ID NO: 3662 - DNA, 26 bp, Vaccinia virus
acaaagatggctatcggtatattcta

SEQ ID NO: 3663 - DNA, 16 bp, Vaccinia virus
ctgttgttcagcagtg

SEQ ID NO: 3664 - DNA, 16 bp, Vaccinia virus
ctgttgttcagcagtg

SEQ ID NO: 3665 - DNA, 21 bp, Vaccinia virus
tccaccctgggtaataaaaga

SEQ ID NO: 3666 - DNA, 21 bp, Vaccinia virus
ttaaatattcagaaccgagga

SEQ ID NO: 3667 - DNA, 23 bp, Vaccinia virus
atctttctctctagtctttctca

SEQ ID NO: 3668 - DNA, 22 bp, Vaccinia virus
atgaataaaaatacatctactg

SEQ ID NO: 3669 - DNA, 17 bp, Vaccinia virus
agtcatggagaccagcc

SEQ ID NO: 3670 - DNA, 17 bp, Vaccinia virus
agtaaaagttttagcca

SEQ ID NO: 3671 - DNA, 19 bp, Vaccinia virus
ttctcacagatgggcagca

SEQ ID NO: 3672 - DNA, 18 bp, Vaccinia virus
cgtacggaaaagtcttca

SEQ ID NO: 3673 - DNA, 18 bp, Vaccinia virus
ggaaaaggaagaaagcca

SEQ ID NO: 3674 - DNA, 22 bp, Vaccinia virus
acaactgacagcagccagctca

SEQ ID NO: 3675 - DNA, 24 bp, Vaccinia virus
aatatttttaaatgttgtctctct

SEQ ID NO: 3676 - DNA, 25 bp, Vaccinia virus
ctttaattttaaaaaacgtattcca

SEQ ID NO: 3677 - DNA, 22 bp, Vaccinia virus
ctgttgacccatgtccacctat

SEQ ID NO: 3678 - DNA, 21 bp, Vaccinia virus
aaaaattgggatatgttatct

SEQ ID NO: 3679 - DNA, 19 bp, Vaccinia virus
cacacgctcccgccagcga

SEQ ID NO: 3680 - DNA, 20 bp, Vaccinia virus
gctaagggtgaaacttttca

SEQ ID NO: 3681 - DNA, 23 bp, Vaccinia virus
tattttgacatctctctctcttc

SEQ ID NO: 3682 - DNA, 22 bp, Vaccinia virus
caggaatgtgtcatttcccaca

SEQ ID NO: 3683 - DNA, 18 bp, Vaccinia virus
gaaattaatcctttgtgg

SEQ ID NO: 3684 - DNA, 19 bp, Vaccinia virus
gaataaaagccagagactg

SEQ ID NO: 3685 - DNA, 17 bp, Vaccinia virus
tgactttcaccaattta

SEQ ID NO: 3686 - DNA, 23 bp, Vaccinia virus
ctccagacccagatggtgtctca

SEQ ID NO: 3687 - DNA, 18 bp, Vaccinia virus
ggaaaaggaagaaagcca

SEQ ID NO: 3688 - DNA, 20 bp, Vaccinia virus
tagagaagggaaagacttta

SEQ ID NO: 3689 - DNA, 23 bp, Vaccinia virus
tgaatctgccaacaccagaactt

SEQ ID NO: 3690 - DNA, 18 bp, Vaccinia virus
aaaagagctctattagga

SEQ ID NO: 3691 - DNA, 16 bp, Vaccinia virus
atggacttaatctctg

SEQ ID NO: 3692 - DNA, 18 bp, Vaccinia virus
taatgtttccaacatgaa

SEQ ID NO: 3693 - DNA, 25 bp, Vaccinia virus
gaaaaaacaaaaagttatatatgaa

SEQ ID NO: 3694 - DNA, 22 bp, Vaccinia virus
ttgaaaaaaataaatgtacatt

SEQ ID NO: 3695 - DNA, 19 bp, Vaccinia virus
ttgcatgttaaatgatact

SEQ ID NO: 3696 - DNA, 23 bp, Vaccinia virus
ttcctattactctgcatatctta

SEQ ID NO: 3697 - DNA, 20 bp, Vaccinia virus
cagctccaccatatttctcc

SEQ ID NO: 3698 - DNA, 19 bp, Vaccinia virus
tctgtaccttctccatcca

SEQ ID NO: 3699 - DNA, 22 bp, Vaccinia virus
aatttcttcactgactccacca

SEQ ID NO: 3700 - DNA, 18 bp, Vaccinia virus
agccacagaaaatatacc

SEQ ID NO: 3701 - DNA, 19 bp, Vaccinia virus
tttaggccccaatacctta

SEQ ID NO: 3702 - DNA, 17 bp, Vaccinia virus
tgctgggctttagcaaa

SEQ ID NO: 3703 - DNA, 22 bp, Vaccinia virus
ataaaaaaggtacaaaaagtga

SEQ ID NO: 3704 - DNA, 21 bp, Vaccinia virus
cagccccagctgctcctcctc

SEQ ID NO: 3705 - DNA, 20 bp, Vaccinia virus
ctcattcgagaccccataga

SEQ ID NO: 3706 - DNA, 19 bp, Vaccinia virus
tgagcagctcctggaagac

SEQ ID NO: 3707 - DNA, 17 bp, Vaccinia virus
agtcacagagaggtgcc

SEQ ID NO: 3708 - DNA, 21 bp, Vaccinia virus
gaaacgagaacaatgacatta

SEQ ID NO: 3709 - DNA, 22 bp, Vaccinia virus
tattgaaaggaaagtgctatcg

SEQ ID NO: 3710 - DNA, 22 bp, Vaccinia virus
tattgaaagggctgcaccatgc

SEQ ID NO: 3711 - DNA, 17 bp, Vaccinia virus
agaatcacctctaatcc

SEQ ID NO: 3712 - DNA, 20 bp, Vaccinia virus
agttctttaaaaatattcta

SEQ ID NO: 3713 - DNA, 18 bp, Vaccinia virus
atggagtctccctctgtc

SEQ ID NO: 3714 - DNA, 21 bp, Vaccinia virus
aataataacatatacaattaa

SEQ ID NO: 3715 - DNA, 22 bp, Vaccinia virus
cctgccccctaccctgttctcc

SEQ ID NO: 3716 - DNA, 20 bp, Vaccinia virus
agatatgtaaacactggtac

SEQ ID NO: 3717 - DNA, 17 bp, Vaccinia virus
aggtaaagactttagta

SEQ ID NO: 3718 - DNA, 21 bp, Vaccinia virus
aggcccacataaaataccaac

SEQ ID NO: 3719 - DNA, 18 bp, Vaccinia virus
attctgagtgatgatgaa

SEQ ID NO: 3720 - DNA, 23 bp, Vaccinia virus
ctccagacccagatggtgtctca

SEQ ID NO: 3721 - DNA, 18 bp, Vaccinia virus
gaaaagacaaagtcctcg

SEQ ID NO: 3722 - DNA, 21 bp, Vaccinia virus
tgaagcaagagacagacccac

SEQ ID NO: 3723 - DNA, 19 bp, Vaccinia virus
gccgtctcacctccaaagg

SEQ ID NO: 3724 - DNA, 20 bp, Vaccinia virus
tgagaaaaacccacaactaa

SEQ ID NO: 3725 - DNA, 18 bp, Vaccinia virus
gagttcaaaagtaccaca

SEQ ID NO: 3726 - DNA, 21 bp, Vaccinia virus
taatgctacatggaacatgaa

SEQ ID NO: 3727 - DNA, 25 bp, Vaccinia virus
aaggatttcagtattcatgggacaa

SEQ ID NO: 3728 - DNA, 21 bp, Vaccinia virus
gaaaccattgcaggtatttca

SEQ ID NO: 3729 - DNA, 18 bp, Vaccinia virus
ttctctccttctctcttc

SEQ ID NO: 3730 - DNA, 20 bp, Vaccinia virus
aacatgactaacggatattc

SEQ ID NO: 3731 - DNA, 18 bp, Vaccinia virus
aatcaacacccttgcccc

SEQ ID NO: 3732 - DNA, 19 bp, Vaccinia virus
agagaaagtcttgcttttt

SEQ ID NO: 3733 - DNA, 18 bp, Vaccinia virus
ttctattttccccacaaa

SEQ ID NO: 3734 - DNA, 18 bp, Vaccinia virus
gcagaggcaccatcttgg

SEQ ID NO: 3735 - DNA, 16 bp, Vaccinia virus
ttctaaccaccacaag

SEQ ID NO: 3736 - DNA, 18 bp, Vaccinia virus
ctaagttaagacttttca

SEQ ID NO: 3737 - DNA, 17 bp, Vaccinia virus
tatctctgttttggcat

SEQ ID NO: 3738 - DNA, 21 bp, Vaccinia virus
gctaataatgatggcctctca

SEQ ID NO: 3739 - DNA, 17 bp, Vaccinia virus
cctgtcaggatccgagt

SEQ ID NO: 3740 - DNA, 17 bp, Vaccinia virus
aagataatgccaactca

SEQ ID NO: 3741 - DNA, 20 bp, Vaccinia virus
gctctatagaacatgtctac

SEQ ID NO: 3742 - DNA, 19 bp, Vaccinia virus
ataaagttggatggaaagg

SEQ ID NO: 3743 - DNA, 22 bp, Vaccinia virus
ttggaatctgtgctttgcagaa

SEQ ID NO: 3744 - DNA, 19 bp, Vaccinia virus
ctcatggatgagtaccaca

SEQ ID NO: 3745 - DNA, 18 bp, Vaccinia virus
tgggccagcagattctcc

SEQ ID NO: 3746 - DNA, 17 bp, Vaccinia virus
tcccctctgccacccca

SEQ ID NO: 3747 - DNA, 20 bp, Vaccinia virus
ttctcataaatccccgccca

SEQ ID NO: 3748 - DNA, 17 bp, Vaccinia virus
tcccctctgccacccca

SEQ ID NO: 3749 - DNA, 18 bp, Vaccinia virus
gcttctacgactccgcca

SEQ ID NO: 3750 - DNA, 20 bp, Vaccinia virus
ttctcataaatccccgccca

1. A bioinformatically detectable novel viral gene encoding substantially pure nucleic acid wherein:
RNA encoded by said bioinformatically detectable novel viral gene is about 18 to about 24 nucleotides in length, and originates from an RNA precursor, which RNA precursor is about 50 to about 120 nucleotides in length;
a nucleotide sequence of a first half of said RNA precursor is a partial inversed-reversed sequence of a nucleotide sequence of a second half thereof;
a nucleotide sequence of said RNA encoded by said novel viral gene is a partial inversed-reversed sequence of a nucleotide sequence of a binding site associated with at least one host target gene; and
a function of said novel viral gene is bioinformatically deducible.

2. A bioinformatically detectable novel viral gene encoding substantially pure DNA wherein:
RNA encoded by said bioninformatically detectable novel viral gene comprises a plurality of RNA sections, each of said RNA sections being about 50 to about 120 nucleotides in length, and comprising an RNA segment, which RNA segment is about 18 to about 24 nucleotides in length;
a nucleotide sequence of a first half of each of said RNA sections encoded by said novel gene is a partial inversed-reversed sequence of nucleotide sequence of a second half thereof;
a nucleotide sequence of each of said RNA segments encoded by said novel gene is a partial inversed-reversed sequence of the nucleotide sequence of a binding site associated with at least one target gene; and
a function of said novel gene is bioinformatically deducible from the following data elements: said nucleotide sequence of said RNA encoded by said novel gene, a nucleotide sequence of said at least one target gene, and function of said at least one target gene.

3. A bioinformatically detectable novel viral gene encoding substantially pure DNA wherein:
RNA encoded by said bioinformatically detectable novel gene is about 18 to about 24 nucleotides in length, and originates from an RNA precursor, which RNA precursor is about 50 to about 120 nucleotides in length;
a nucleotide sequence of a first half of said RNA precursor is a partial inversed-reversed sequence of a nucleotide sequence of a second half thereof;
a nucleotide sequence of said RNA encoded by said novel gene is a partial inversed-reversed sequence of a nucleotide sequence of a binding site associated with at least one target gene;
a function of said novel gene is modulation of expression of said at least one target gene; and
said at least one target gene does not encode a protein.

4. A bioinformatically detectable novel gene according to claim 1 and wherein said function of said novel gene is bioinformatically deducible from the following data elements:
said nucleotide sequence of said RNA encoded by said bioinformatically detectable novel gene,
a nucleotide sequence of said at least one target gene; and
a function of said at least one target gene.

5. A bioinformatically detectable novel gene according to claim 1 and wherein said RNA encoded by said novel gene complementarily binds said binding site associated with said at least one target gene, thereby modulating expression of said at least one target gene.

6. A bioinformatically detectable novel gene according to claim 1 and wherein:
said binding site associated with at least one target gene is located in an untranslated region of RNA encoded by said at least one target gene.

7. A bioinformatically detectable novel gene according to claim 5 and wherein:
said function of said novel gene is selective inhibition of translation of said at least one target gene, which selective inhibition comprises complementary hybridization of said RNA encoded by said novel gene to said binding site.

8. A vector comprising the DNA of claim 1.

9. A method of selectively inhibiting translation of at least one gene, comprising introducing the vector of claim 8 into a cell.

10. A method according to claim 9 and wherein said introducing comprises utilizing RNAi pathway.

11. A gene expression inhibition system comprising:
the vector of claim 8; and
a vector inserter, functional to insert said vector of claim 10 into a cell, thereby selectively inhibiting translation of at least one gene.

12. A probe comprising the DNA of claim 1.

13. A method of selectively detecting expression of at least one gene, comprising using the probe of claim 12(14).

14. A gene expression detection system comprising:
the probe of claim 12; and
a gene expression detector functional to selectively detect expression of at least one gene.

15. An anti-viral substance capable of neutralizing said RNA of claim 1.

16. A substance according to claim 15 and wherein said neutralizing comprises complementarily binding said RNA.

17. A substance according to claim 15 and wherein said neutralizing comprises immunologically neutralizing.

18. A method for anti-viral treatment comprising neutralizing said RNA of claim 1.

19. A method according to claim 18 and wherein said neutralizing comprises:
synthesizing a complementary nucleic acid molecule, a nucleic sequence of which complementary nucleic acid molecule is a partial inversed-reversed sequence of said RNA; and
transfecting host cells with said complementary nucleic acid molecule, thereby complementarily binding said RNA.

20. A method according to claim 18 and wherein said neutralizing comprises immunologically neutralizing.
